(19) United States
(12) Patent Application Publication
(10) Pub. No.: US 2022/0008368 A1
(43) Pub. Date: Jan. 13, 2022

(54) METHODS AND COMPOSITIONS RELATED TO TARGETING FFAR2 AND ILC3 POPULATIONS FOR THE TREATMENT OF A GASTROINTESTINAL DISEASE

(71) Applicant: PRESIDENT AND FELLOWS OF HARVARD COLLEGE, Cambridge, MA (US)

(72) Inventors: Eunyoung CHUN, Brookline, MA (US); Wendy Sarah GARRETT, Brookline, MA (US)

(73) Assignee: PRESIDENT AND FELLOWS OF HARVARD COLLEGE, Cambridge, MA (US)

(21) Appl. No.: 17/293,840

(22) PCT Filed: Nov. 14, 2019
(86) PCT No.: PCT/US2019/061358

§ 371 Date: May 13, 2021

Related U.S. Application Data
(60) Provisional application No. 62/767,847, filed on Nov. 15, 2018.

(51) Int. Cl. A61K 31/19; A61K 31/426; A61K 31/513; A61K 38/17; A61P 1/04; A61P 29/00; G01N 33/92; G01N 33/50

(52) U.S. Cl. CPC A61K 31/19; A61K 31/426; A61K 31/513; A61K 38/177; A61K 48/00; A61P 29/00; G01N 33/92; G01N 33/5047; A61P 1/04

(57) ABSTRACT

Described herein are methods, assays, and compositions and uses thereof related to treating, preventing, and detecting a gastrointestinal disease with an agent that targets Ffar2. The agents described herein can further increase populations of group 3 innate lymphoid cells (ILC3s) in the gut.

### CROSS-REFERENCE TO RELATED APPLICATION

[0001] This application claims benefit under 35 U.S.C. § 119(e) of U.S. Provisional Application No. 62/767,847 filed Nov. 15, 2018, the content of which is incorporated herein by reference in its entirety.

### GOVERNMENT SUPPORT

[0002] This invention was made with government support under Grant No. R01CA154426, awarded by the National Institutes of Health. The government has certain rights in the invention.

### TECHNICAL FIELD

[0003] The technology described herein relates to methods, compositions, and assays for treating, preventing, and detecting a gastrointestinal disease and uses thereof.

### BACKGROUND

[0004] Gastrointestinal diseases (e.g. ulcerative colitis) are debilitating diseases that result in abdominal pain, diarrhea, weight loss, fever, among other symptoms. The gut has group 3 innate lymphoid cells (ILC3s) that sense environmental signals useful for the normal activity in the body's defense from infections caused by microorganisms (e.g. bacteria). Short-chain fatty acids (SCFAs), are a type of microbial metabolite that have emerged as significant regulators of immune responses in the gut and systemically. Ffar2, a SCFA-sensing receptor, is broadly immunomodulatory and plays a significant role in regulation of inflammation within the gut. However, the metabolite-sensing receptors that regulate ILC3s in the gastrointestinal tract remain poorly understood. Thus, there is an unmet need for therapeutics that target ILC3 function to treat gastrointestinal diseases and infections.

### SUMMARY

[0005] Provided herein are methods, assays, and compositions related to treating and preventing a gastrointestinal disease in a subject.

[0006] In one aspect, described herein is method for treating or preventing a gastrointestinal disease, the method comprises: administering to a subject in need thereof an agent that increases the level or activity of Free Fatty Acid Receptor 2 (Ffar2) in the subject.

[0007] In another aspect, described herein is an assay for identifying an agent that modulates a functional property of an immune lymphoid cell, the assay comprises: (a) contacting a population of innate lymphoid cells with an agent; and (b) detecting the level of Ffar2; wherein detecting a change in Ffar2 levels after contacting step (a) identifies the agent as one that can modulate a functional property of innate lymphoid cells.

[0008] In another aspect, described herein is a method of treating a gastrointestinal disease in a subject, the method comprises: (a) measuring the level of Ffar2 in a biological sample of a subject; and (b) comparing the measurement of (a) to a reference level; (c) identifying a subject with decreased Ffar2 in (a) as compared to a reference level as having a gastrointestinal disease; and (d) administering to the subject having a gastrointestinal disease an agent that modulates Ffar2.

[0009] In another aspect, described herein is a method of reducing inflammation in the gastrointestinal tract of a subject, the method comprises: administering to a subject an agent that increases the level or activity of Free Fatty Acid Receptor 2 (Ffar2) in the subject.

[0010] In another aspect, described herein is a pharmaceutical composition formulated for the treatment of a gastrointestinal disease, the pharmaceutical composition comprising: an agent that increases the level or activity of Ffar2, wherein the pharmaceutical composition increases the number of group 3 innate lymphoid cells (ILC3s) in a subject.

[0011] In one embodiment of any of the aspects, the agent preferentially binds to a Ffar2 receptor.

[0012] In another embodiment of any of the aspects, the agent induces an increase in the number of group 3 innate lymphoid cells (ILC3s).

[0013] In another embodiment of any of the aspects, the agent induces secretion of interleukin-22 (IL-22) and/or interleukin-17 (IL-17) from ILC3s.

[0014] In another embodiment of any of the aspects, the agent is selected from the group consisting of a small molecule, an antibody, a peptide, a genome editing system, a vector, nucleic acid, a miRNA, and a siRNA.

[0015] In another embodiment of any of the aspects, the small molecule is a short chain fatty acid (SCFA) or derivative thereof.

[0016] In another embodiment of any of the aspects, the small molecule is selected from the group consisting of: ES43012-SOD, trans-2-methylcrotonic acid, propiolic acid, angelic acid, compound 34, sodium acetate, sodium propionate, sodium butyrate, formate, pentanoate, (S)-2-(4-chlorophenyl)-3,3-dimethyl-N-(5-phenylthiazol-2-yl)butanamide, BTI-A-404, BTI-A-292, AZ1729, and any derivative thereof.

[0017] In another embodiment of any of the aspects, the agent is a vector that encodes the agent. In another embodiment, the vector or nucleic acid encodes a Ffar2 polypeptide

[0018] In another embodiment of any of the aspects, the vector is non-integrative or integrative. In another embodiment of any of the aspects, the non-integrative vector is selected from the group consisting of an episomal vector, an EBNA1 vector, a minicircle vector, a non-integrative adenovirus, a non-integrative RNA, and a Sendai virus. In another embodiment of any of the aspects, the vector is an episomal vector. In another embodiment of any of the aspects, the vector is a lentiviral vector.

[0019] In another embodiment of any of the aspects, the agent is formulated with a pharmaceutical composition.

[0020] In another embodiment of any of the aspects, the pharmaceutical composition is formulated to restrict delivery of the agent to the gastrointestinal tract of the subject. In another embodiment, the pharmaceutical composition comprises an enteric coating.

[0021] In another embodiment of any of the aspects, the gastrointestinal disease is selected from the group consisting of: a gastrointestinal infection, inflammatory bowel disease (IBD), gastrointestinal injury, appendicitis, Crohn's disease (CD), ulcerative colitis (UC), gastritis, enteritis, esophagitis, gastroesophageal reflux disease (GERD), celiac disease, diverticulitis, food intolerance, ulcer, infectious colitis, irritable bowel syndrome, and cancer.

[0022] In another embodiment of any of the aspects, the administering reduces inflammation of the gastrointestinal tract.

[0023] In another embodiment of any of the aspects, the subject is a mammal. In another embodiment of any of the aspects, the mammal is a human.

[0024] In another embodiment of any of the aspects, the level or activity of Ffar2 is increased by at least 50%, at least 60%, at least 70%, at least 80%, at least 90%, or more as compared to an appropriate control.

[0025] In another embodiment of any of the aspects, the secretion of IL-22 and/or IL-17 from ILC3s is increased by at least 50%, at least 60%, at least 70%, at least 80%, at least 90%, or more as compared to an appropriate control.

[0026] In another embodiment of any of the aspects, the agent is administered by direct injection, subcutaneous injection, muscular injection, oral, or nasal administration.

[0027] In another embodiment of any of the aspects, detecting step (b) further comprises detecting the level of IL-22. In another embodiment of any of the aspects, detecting step (b) further comprises detecting the level of RORγt, X-box binding protein-1 (XBP1), phosphorylated-Akt, phosphorylated STAT3, phosphorylated ERK, mucin 2, mucin 3, mucin 4, mucin 5a, mucin 5b, Regenerating islet-derived protein (Reg) 3 alpha, Reg 3 beta, Reg 3 gamma, and/or Ki-67.

[0028] In another embodiment of any of the aspects, the innate lymphoid cells are group 3 innate lymphoid cells (ILC3).

[0029] In another embodiment of any of the aspects, the method further comprises, prior to (a), obtaining a biological sample from the subject.

[0030] In another embodiment of any of the aspects, the biological sample is a blood sample, buffy coat, serum, or tissue. In another embodiment of any of the aspects, the tissue is removed from the esophagus, small intestine, large intestine, or colon.

### BRIEF DESCRIPTION OF THE DRAWINGS

[0031] FIG. 1A-1D shows that Ffar2 agonism selectively promotes colonic RORγt+ ILC3 expansion. FIG. 1A shows Ffar2 mRNA expression in the indicated cell population from the colon of WT mice (n=6 mice pooled per cell type per experiment). mRNA expression was normalized to housekeeping gene Actb. NK, conventional NK cells (NK1.1+); G, granulocytes (CD11b+Gr-1+); Mac, macrophages (CD11b+Gr-1−CD11c−); DC, conventional dendritic cells (CD11c+MHCII+), and ILC, innate lymphoid cells (Lin−CD90.2+). FIG. 1B shows Ffar2 mRNA expression in colonic ILC subsets from WT mice (n=6 mice pooled per cell subsets per experiment). FIG. 1C shows flow cytometry analysis of colonic ILC populations from WT mice fed with an Ffar2 agonist (n=9) or control (n=6). Colonic lamina propria (LP) cells were isolated and stained with viability dye, antibodies to lineage markers (CD3, Gr-1, CD11b, CD45R/B220, and Ter-119), anti-NK1.1, anti-CD45, anti-CD90.2, anti-Gata3, and anti-RORγt. Percentage among ILCs and the number of ILC1s (gated on live CD45+Lin−NK1.1−CD90.2+GATA3− RORγt−), ILC2s (gated on live CD45+Lin−NK1.1−CD90.2+GATA3+ RORγt−) and ILC3s (gated on live CD45+Lin−NK1.1−CD90.2+GATA3− RORγt+) were analyzed. FIG. 1D shows Ki-67 expression in colonic ILC2s and ILC3s from WT fed with the Ffar2 agonist (n=7) or control (n=6). Flow cytometry plots of live ILC2s (gated on live CD45+Lin−NK1.1−CD90.2+GATA3+ RORγt−) and ILC3s (gated on live CD45+Lin−NK1.1−CD90.2+GATA3− RORγt+) are shown (left). Numbers in flow cytometry plots represent percentages of Ki-67+ cells in each gate. Percentage and number of Ki-67+ cells among colonic ILC3s were analyzed by flow cytometry (right). Each symbol (FIGS. 1C-1D) represents an individual mouse. Data are representative of 3 independent experiments (a,b,d) and 4 independent experiments (FIG. 1C). Data represent means±s.e.m. * P<0.05, ** P<0.01, *** P<0.001, **** P<0.0001 (one-way ANOVA with Tukey's (FIG. 1A) or Dunnett's (FIG. 1B) multiple comparisons test, two-tailed Mann-Whitney test (FIGS. 1C-1D)).

[0032] FIG. 2A-2E shows Ffar2 regulates colonic ILC3 proliferation and ILC3-derived IL-22 production in a cell-intrinsic manner. FIG. 2A shows colonic RORγt+ ILC3s from RORγt−Cre Ffar2^{fl/fl} (n=8) mice or their littermate control Ffar2^{fl/fl} mice (n=8) were analyzed by flow cytometry. Isolated colonic LP cells were stained and gated on live CD45+Lin−NK1.1−CD90.2+GATA3− RORγt+ for colonic ILC3s. FIG. 2B shows Ki-67 expression in colonic ILC3s from RORγt−Cre Ffar2^{fl/fl} (n=6) mice or their littermate control Ffar2^{fl/fl} mice (n=5). Flow cytometry plots of live ILC3s (gated on live CD45+Lin−NK1.1−CD90.2+RORγt+) are shown (left). Numbers in flow cytometry plots represent percentages of Ki-67+ cells. Percentage and number of Ki-67+ cells among colonic ILC3s are shown (right). FIG. 2C shows intracellular cytokine staining of colonic RORγt+ ILC3s from RORγt−Cre Ffar2^{fl/fl} mice (n=8) or littermate control Ffar2^{fl/fl} mice (n=8). Representative flow cytometry plot for IL-22 and IL-17A staining in colonic ILC3s (gated on live CD45+Lin−NK1.1−CD90.2+RORγt+) (left). Percentage and number of IL-22 or IL-17A-producing ILC3s among colonic ILC3s are shown (right). FIG. 2D shows flow cytometry analysis of RORγt expression in colonic RORγt+ ILC3s from RORγt−Cre Ffar2^{fl/fl} (n=9) mice or their littermate control Ffar2^{fl/fl} mice (n=8). Histogram represents mean fluorescence intensity (MFI) of RORγt in colonic ILC3s from indicated mice. Gray shaded area indicates isotype-matched control antibody. Bar graph depicts the average MFI of RORγt in colonic ILC3s. FIG. 2E shows intracellular Ahr levels in colonic RORγt+ ILC3s or IL-22− producing ILC3s from RORγt−Cre Ffar2^{fl/fl} (n=9) mice or control Ffar2^{fl/fl} mice (n=8). MFI of Ahr in indicated cells was measured by flow cytometry. Each symbol (a,b,c) represents an individual mouse. Data are representative of 4 independent experiments (FIG. 2A), 3 independent experiments (FIG. 2B), 4 independent experiments (FIG. 2C) or are pooled from 2 independent experiments with a total of at least 4 mice per group (FIG. 2D-2E). Data represent means±s.e.m. * P<0.05, ** P<0.01, *** P<0.001 (unpaired two-tailed Student's t-test (FIG. 2A-2E), two-tailed Mann-Whitney test (FIG. 2B) as these data were not normally distributed, this non-parametric test was employed).

[0033] FIG. 3A-3G shows Ffar2 influences CCR6+ILC3 expansion and function. FIG. 3A shows flow cytometry analysis of colonic ILC3 subsets in RORγt−Cre Ffar2^{fl/fl} (n=5) mice or their littermate control Ffar2^{fl/fl} mice (n=5). Representative flow cytometry plot of CCR6+ ILC3s (gated on live CD45+Lin−NK1.1−CD90.2+RORγt+CCR6+NKp46−), CCR6− ILC3s (gated on live CD45+Lin−NK1.1−CD90.2+RORγt+CCR6−NKp46−), and NKp46+ ILC3s (gated on live CD45+Lin−NK1.1−CD90.2+RORγt+CCR6−NKp46+) are shown (left). Numbers of colonic ILC3 subsets are shown (right). FIG. 3B shows Ki-67 expression in colonic ILC3 subsets from RORγt−Cre Ffar2^{fl/fl} (n=5) mice or littermate control Ffar2^{fl/fl} mice (n=5). Flow cytometry plots of Ki-67+ cells in CCR6+ ILC3s and CCR6− ILC3s are shown (left). Numbers in flow cytometry plots represent percentages of Ki-67+ cells. Numbers of colonic Ki-67+ cells in colonic ILC3 subsets are shown (right). FIG. 3C shows IL-22− producing ILC3 subsets in RORγt−Cre Ffar2^{fl/fl} (n=5) mice or Ffar2^{fl/fl} mice (n=5). (FIGS. D-G) Distribution of Ffar2-expressing ILC3s in colonic lymphoid tissues of RORγt−Cre Ffar2^{fl/fl} mice (n=4) or littermate control Ffar2^{fl/fl} mice (n=4). RNA in situ hybridization of Ffar2 (magenta) and Rorc (blue) and immunofluorescence staining of CD3 (green) were performed on colon tissue section. FIG. 3D shows representative images of colonic ILC3s (RORγt+CD3−) in a colonic patch and a colonic solitary intestinal lymphoid tissue (SILT) from RORγt−Cre Ffar2^{fl/fl} mice or Ffar2^{fl/fl} mice. Scale bars, 100 μm (colonic patch); 20 μm (colonic SILT). FIG. 3E shows representative images of Ffar2 expression on colonic ILC3s in colonic lymphoid tissues. Scale bars, 10 μm. FIG. 3F shows number of colonic patches and colonic SILTs in the colon from RORγt−Cre Ffar2^{fl/fl} mice or littermate control Ffar2^{fl/fl} mice. FIG. 3G shows quantification of colonic ILC3s in colonic lymphoid tissues of RORγt-Cre Ffar2^{fl/fl} mice or Ffar2^{fl/fl} mice. Number of ILC3s (RORγt+CD3−) in a colonic patch or SILT was counted. Data are representative of 3 independent experiments (FIGS. A-C) or combined from 2 independent experiments (FIGS. 3D-3G). Data represent means±s.e.m. * P<0.05, ** P<0.01 (two-tailed Mann-Whitney test).

[0034] FIG. 4A-4F shows Ffar2 regulates colonic ILC3-derived IL-22 via AKT and STAT3 activation. FIG. 4A-4E shows flow cytometry analysis of phosphorylation of AKT, p38, ERK and STAT3 in sorted colonic ILC3s. FIG. 4A shows phosphorylation of AKT, p38 and ERK in sorted colonic ILC3s (gated on live CD45+Lin−NK1.1− NKp46+/−CD90.2+KLRG1−) from WT (n=20 for each signal protein) or Ffar2−/− mice (n=20 for each signal protein). Percentage of phosphorylated cells and MFI level are shown. FIG. 4B shows phosphorylation of AKT in sorted colonic ILC3s from WT mice that were cultured with Ffar2 agonist (n=24). FIG. 4C shows STAT3 activation in sorted colonic ILC3s from WT (n=24) or Ffar2−/− mice (n=24). FIG. 4D shows phosphorylation of STAT3 in sorted colonic ILC3s from WT mice that were cultured with Ffar2 agonist (n=24). FIG. 4E shows pSTAT3 expression in sorted colonic ILC3s cultured with Ffar2 agonist and AKT inhibitor (VIII) (n=30) FIG. 4F shows IL-22 expression in sorted ILC3s cultured with Ffar2 agonist, AKT inhibitor (VIII) or STAT3 inhibitor (S3I) (AKT inhibitor, n=24; STAT3 inhibitor, n=24). IL-22 expression was normalized to the housekeeping gene Actb. Data are pooled from 4 independent experiments. Data represent means±s.e.m. * P<0.05, ** P<0.01 (two-tailed Student's t-test).

[0035] FIG. 5A-5F shows Ffar2-expressing ILC3s protect against DSS-induced colonic injury and inflammation. FIG. 5A shows gene expression in epithelial cells of RORγt−Cre Ffar2^{fl/fl} (n=7) mice compared to littermate control Ffar2^{fl/fl} mice (n=6). FIG. 5B-5F shows RORγt−Cre Ffar2^{fl/fl} (n=12) and Ffar2^{fl/fl} mice (n=12) were given 3% DSS solution for 5 days followed by 2 days of normal water. Mice were sacrificed on day 7. FIG. 5B shows body weight changes were measured daily. FIG. 5C shows colon length. FIG. 5D shows histologic colitis score. FIG. 5E-5F shows flow cytometry analysis of colonic ILC3s and IL-22− producing ILC3s. Colonic LPs were isolated from RORγt−Cre Ffar2^{fl/fl} and Ffar2^{fl/fl} mice on day 7 after DSS treatment, stained with antibodies against RORγt+ILC3s and IL-22− producing RORγt+ ILC3s. Percentage and number of colonic ILC3s (gated on live CD45+Lin−NK1.1−CD90.2+RORγt+) and IL-22+ILC3s were shown. Each symbol (FIG. 5E-5F) represents an individual mouse. Data are combined from 2 independent experiments (FIG. 5A) or 3 independent experiments (FIG. 5B-D) or are representative of 3 independent experiments (FIG. 5E-5F). Data represent means±s.e.m. * P<0.05, ** P<0.01, *** P<0.001(unpaired two-tailed Student's t-test (FIGS. 5A-5F), two-tailed Mann-Whitney test (FIGS. 5E-5F)).

[0036] FIGS. 6A-6E shows Ffar2-expressing ILC3s are required for host defense against C. rodentium infection. RORγt−Cre Ffar2^{fl/fl} (n=15) and their littermate control Ffar2^{fl/fl} mice (n=14) were infected with 4×109 CFU of C. rodentium by oral gavage. Mice were sacrificed on day 7. FIG. 6A shows body weight changes were measured daily. FIG. 6B shows colon length. FIG. 6C shows bacterial load in spleen (left) and liver (right) on day 7. FIGS. 6D-6E shows flow cytometry analysis of colonic ILC3s and IL-22− producing ILC3s. Colonic LPs were isolated from RORγt−Cre Ffar2^{fl/fl} and Ffar2^{fl/fl} mice on day 7 after C. rodentium infection, stained with antibodies against RORγt+ ILC3s and IL-22+RORγt+ ILC3s. Percentage and number of colonic ILC3s (gated on live CD45+Lin−NK1.1−CD90.2+RORγt+) and IL-22+ILC3s were shown. Each symbol (FIGS. 6D-E) represents an individual mouse. Data are combined from 3 independent experiments (FIGS. 6A-C) or are representative of 3 independent experiments (FIGS. 6D-6E). Data represent means±s.e.m. * P<0.05, ** P<0.01 (unpaired two-tailed Student's t-test (FIGS. 6A-6B), two-tailed Mann-Whitney test (FIG. 6C-6E)).

[0037] FIG. 7A-7F shows colonic ILC3s may be a target of Ffar2 agonism. FIG. 7A-7B shows a T cell-transfer colitis model. C57BL/6 Rag2−/− mice were injected with naïve CD4+ T cells (CD3+CD4+CD25−CD45RBhi, 5×105 cells/mouse) alone or in combination with Treg cells (CD3+CD4+Foxp3+, 1×105 cells/mouse) from WT mice. After injection, mice received an Ffar2 agonist or sodium propionate for 6 weeks. FIG. 7A shows histologic colitis score. Naïve CD4+ T cells only (n=6); Foxp3+ Tregs (n=7); Ffar2 agonist (n=7); sodium propionate (n=7) FIG. 7B shows the number of colonic Treg cells (gated on live CD45+CD3+CD4+Foxp3+) from T cell-transfer colitis mice. Naïve CD4+ T cells only (n=6); Foxp3+ Tregs (n=7); Ffar2 agonist (n=7); sodium propionate (n=7) FIG. 7C shows flow cytometry analysis of colonic RORγt+ ILC3s from WT mice fed with SCFAs. N, sodium chloride as a control (n=18 (n=6 for each SCFA)); A, sodium acetate (n=10); P, sodium propionate (n=8); B, sodium butyrate (n=8). Percentage (left) and number (right) of colonic ILC3s (gated on live CD45+Lin−NK1.1−CD90.2+RORγt+) are shown. FIG. 7D shows flow analysis of colonic RORγt+ ILC3s from WT (n=7) or germ-free (GF) WT mice (n=8). FIG. 7E shows number of colonic RORγt+ ILC3s from GF-WT fed with Ffar2 agonist for 1 week. Control (n=4) and Ffar2 agonist (n=6) FIG. 7F shows number of colonic RORγt+ ILC3s from GF-WT fed with sodium acetate (n=5) or sodium chloride (4) as a control for 2-week. Each symbol (FIG. 7A-F) represents an individual mouse. Data are pooled from 3 independent experiments (FIG. 7A-B, FIG. 7D), 6 independent experiments (FIG. 7C) or 2 independent experiments (FIG. 7E-F). Data represent means±s.e.m. * P<0.05, ** P<0.01, *** P<0.001, **** P<0.0001 (one-way ANOVA with Tukey's (FIG. 7A-B) or Dunnett's (FIG. 7C) multiple comparisons test, two-tailed Mann-Whitney test (FIG. 7D-F)).

[0038] FIG. 8A-8F shows FFar2 does not affect total colonic ILCs, GATA3+ILC2s or RORγt+CD4+ T cells. FIG. 8A shows flow analysis of colonic ILCs (gated on live CD45+Lin−NK1.1−CD90.2+) from RORγt−Cre Ffar2^{fl/fl} (n=8) or littermate control Ffar2^{fl/fl} mice (n=8). FIG. 8B shows representative flow cytometry plot of Ki-67 in colonic GATA3+ILC2s (gated on live CD45+Lin−NK1.1−CD90.2+GATA3+RORγt−) from RORγt−Cre Ffar2^{fl/fl} (n=6) mice or their littermate control Ffar2^{fl/fl} mice (n=5). Numbers in flow cytometry plots represent percentages of Ki-67+ cells. FIG. 8C shows flow cytometry analysis of colonic RORγt+CD4+ T cells in RORγt−Cre Ffar2^{fl/fl} mice (n=10) or littermate control Ffar2^{fl/fl} mice (n=11). Frequency of RORγt+ CD4+ T cells (gated on live CD45+CD3+CD4+RORγt+) within CD4+ T cells (upper) and total number of RORγt+CD4+ T cells (bottom) are shown. FIG. 8D shows intracellular cytokine staining of IL-22 and IL-17A in colonic RORγt+CD4+ T cells from RORγt−Cre Ffar2^{fl/fl} mice (n=10) or littermate control Ffar2^{fl/fl} mice (n=11). FIG. 8E shows Il23 expression in colonic lamina propria from RORγt−Cre Ffar2^{fl/fl} mice (n=4) or littermate control Ffar2^{fl/fl} mice (n=4). mRNA expression was normalized to the housekeeping gene Actb. FIG. 8F shows I123r expression in sorted colonic ILC3s (gated on live CD45+Lin−NK1.1−NKp46+/−CD90.2+KLRG1−) from WT (n=15) or Ffar2−/− mice (n=18). mRNA expression was normalized to Actb. Each symbol (FIG. 8B-8C) represents an individual mouse. Data are representative of 4 independent experiments (FIG. 8A) and 3 independent experiments (FIG. 8B) or are pooled from 3 independent experiments (FIGS. 8C-8D) and 6 independent experiments (FIGS. 8E-8F). Data represent means±s.e.m.

[0039] FIG. 9A-9H shows Ffar2 influences colonic RORγt+ CCR6+ ILC3 expansion. FIG. 9A shows RORγt and Ffar2 mRNA expression in colonic ILC3 subsets from WT mice (n=18 per each gene). mRNA expression was normalized to the housekeeping gene Actb. Colonic CCR6+ ILC3s (gated on live CD45+Lin−NK1.1−NKp46−CD90.2+KLRG1−CCR6+) and CCR6− ILC3s (gated on live CD45+Lin−NK1.1−NKp46+/−CD90.2+KLRG1−CCR6−) were isolated with a FACSAria. FIG. 9B shows flow cytometry analysis of RORγt expression in colonic ILC3 subsets from RORγt−Cre Ffar2^{fl/fl} (n=5) mice or their littermate control Ffar2^{fl/fl} mice (n=5). MFI, mean fluorescence intensity. FIG. 9C-G shows distribution of Ffar2-expressing ILC3s in colonic lymphoid tissues of WT mice (n=3) or their littermate Ffar2−/− mice (n=3). RNA in situ hybridization of Ffar2 (magenta) and Rorc (blue) and immunofluorescence staining of CD3 (green) were performed on colon tissue section. FIG. 9C shows representative images of colonic ILC3s (RORγt+CD3−) in a colonic patch and a colonic solitary intestinal lymphoid tissue (SILT) from WT mice or Ffar2−/− mice. Scale bars, 100 μm (colonic patch); 20 μm (colonic SILT). FIG. 9D-9E shows representative images of Ffar2 expression on colonic ILC3s in a colonic patch from WT mice or Ffar2−/− mice. Scale bars, 10 μm. Arrows indicate FFar2-sufficient ILC3 (FIG. 9D) and Ffar2-deficient ILC3 (FIG. 9E). FIG. 9F shows number of colonic patches and colonic SILTs in the colon from WT mice or Ffar2−/− mice. FIG. 9G shows quantification of colonic ILC3s in colonic lymphoid tissues of WT mice or Ffar2−/− mice. Number of ILC3s (RORγt+CD3−) in a colonic patch or colonic SILT was counted. FIG. 9H shows Tbx21, Notch and Tox mRNA expression in colonic CCR6+ ILC3s and CCR6− ILC3s from WT (n=18) or Ffar2−/− mice (n=18). Samples were normalized using Hprt1, Gapdh and Eefla1 as housekeeping genes. Data represent means±s.e.m. Data are pooled from 6 independent experiments (FIG. 9A, FIG. 9H) or are representative of 3 independent experiments (FIG. 9B) and 2 independent experiments (FIG. 9C-9G). * P<0.05, ** P<0.01 (two-tailed Mann-Whitney test).

[0040] FIG. 10A-10F shows FFar2 signaling activates AKT and STAT3 in sorted colonic ILC3s. FIG. 10A shows representative flow cytometry histograms of phosphorylated AKT, p38 and ERK in sorted colonic ILC3s (gated on live CD45+Lin−NK1.1−NKp46+/−CD90.2+KLRG1−) from WT (n=20 for each signal protein) or Ffar2−/− mice (n=20 for each signal protein). Bold lines, WT ILC3; dashed lines, Ffar2−/− ILC3s; gray shaded area, isotype-matched control antibody. FIG. 10B shows representative flow cytometry histogram of phosphorylated AKT in sorted colonic ILC3s from WT mice that were cultured with Ffar2 agonist (n=24). Bold line, Ffar2 agonist; dashed line, vehicle (DI water). FIG. 10C shows phosphorylated p38 and ERK in sorted colonic ILC3s from WT mice that were cultured with Ffar2 agonist (n=24 for each signal protein). Percentage of phosphorylated p38+ and ERK+ cells and MFI levels are shown. FIG. 10D shows IL-22 expression in colonic ILC3s from WT mice (n=15) or Ffar2−/− mice (n=15). mRNA expression was normalized to the housekeeping gene Actb. FIG. 10E shows representative flow cytometry histogram of phosphorylation of STAT3 in sorted colonic ILC3s from WT (n=24) or Ffar2−/− mice (n=24). FIG. 10F shows representative flow cytometry histogram of pSTAT3 in sorted colonic ILC3s from WT mice (n=24) that were cultured with Ffar2 agonist (n=24). Data represent means±s.e.m. Data reflect 4 independent experiments (FIG. 10A-C, FIGS. 10E-10F) and 6 independent experiments (FIG. 10D). Data represent means±s.e.m. ** P<0.01 (two-tailed Student's t-test).

[0041] FIGS. 11A-11H demonstrates that Ffar2 regulates colonic ILC3-derived IL-22 via AKT and STAT3 activation. FIG. 11A shows that Il22 mRNA expression in sorted ILC3s cultured with acetate (A) (10 mM), propionate (P) (10 mM), or Ffar2 agonist (10 mM) (A, N=21; P, N=21; Ffar2 agonist, N=24). FIG. 11B shows Il22 mRNA expression in sorted ILC3s cultured with Ffar2 agonist (10 mM), Gi/o inhibitor (pertussis toxin [PTX]) (500 ng/mL), or a Gq inhibitor (YM-254890) (1 mM) overnight (Gi/o inhibitor, N=24; Gq inhibitor, N=24). FIG. 11C shows Il22 mRNA expression in sorted ILC3s cultured with P (10 mM), PTX (500 ng/mL) or YM-254890 (1 mM) overnight (PTX, N=24; YM-254890, N=24). FIG. 11D-11F shows flow analysis of AKT, p38, ERK, and STAT3 phosphorylation in sorted colonic ILC3s. FIG. 11D shows AKT, p38, and ERK phosphorylation in sorted colonic ILC3s from WT (N=20 for each protein) or Ffar2−/− mice (N=20 for each protein). FIG. 11E shows STAT3 activation in sorted colonic ILC3s from WT (N=24) or Ffar2−/− mice (N=24). FIG. 11F shows AKT, p38, ERK, and STAT3 phosphorylation in sorted colonic ILC3s from mice cultured with P (10 mM) (N=21 for each protein) or Ffar2 agonist (10 mM) (N=24 for each protein). FIG. 11G shows Il22 mRNA expression in sorted ILC3s cultured with Ffar2 agonist (10 mM), AKT (10 mM), or STAT3 inhibitor (10 mM) (AKT inhibitor, N=24; STAT3 inhibitor, N=24). FIG. 11H shows STAT3 activation in sorted colonic ILC3s cultured with AKT inhibitor (10 mM) before stimulation with Ffar2 agonist (10 mM) (N=30). Data pooled from 4 independent experiments. Data reflect 3 independent flow cytometry sorting sessions with cells harvested from 5-7 mice per Ffar2 ligand (FIG. 11A), 4 independent FACS sessions with cells harvested from 6 mice per inhibitor (FIGS. 11B, C, G) or 5-6 mice per protein (FIGS. 11D, E, F, H). Data (bars) represent mean±SEM *p<0.05, **p<0.01, ***p<0.001, two-tailed Student's t test. See also FIGS. 12A-12H.

[0042] FIG. 12A-12H demonstrates that Ffar2 agonism distinctly affects ILC3 proliferation and activates AKT, ERK and STAT3 in sorted colonic ILC3s. FIG. 12A shows the percentage of in vitro BrdU+ incorporation in sorted colonic ILC3s that were cultured with acetate (A) (10 mM) or propionate (P) (10 mM) and BrdU (10 μM) overnight (acetate, n=20; propionate, n=20). FIG. 12B-12C shows representative flow cytometry histograms and MFI levels of phosphorylated AKT, p38, ERK, STAT3 in sorted colonic ILC3s from WT mice (n=20 for each protein) or Ffar2−′− mice (n=20 for each protein). Bold lines, WT (Ffar2+′+) ILC3; dashed lines, Ffar2−′− ILC3s; gray shaded area, isotype-matched control antibody. FIG. 12D shows phosphorylated AKT and STAT3 in sorted colonic ILC3s from WT mice that were cultured with the Ffar2 agonist (n=24 for each protein). Bold line, Ffar2 agonist; dashed line, vehicle (DI water). Representative flow cytometry histograms of pAKT and pSTAT3 are shown (upper panel). MFI levels of pAKT and pSTAT3 are shown (lower panel). FIG. 12E shows phosphorylation of AKT, p38, ERK and STAT3 in sorted colonic ILC3s from Ffar2−/− mice that were cultured the Ffar2 agonist (10 μM) for 30 min (n=24 for each protein). FIG. 12F shows phosphorylation of ERK in sorted colonic ILC3s from WT mice that were cultured with propionate (10 mM) for 1 h (n=20). FIG. 12G shows phosphorylation of STAT3 in sorted colonic ILC3s from WT mice that were cultured with propionate (10 mM) for 1 h (n=20 for each protein). FIG. 12H shows Il22 mRNA expression in sorted ILC3s cultured with the propionate (10 mM) or ERK inhibitor (10 μM) overnight (n=24). Data show means±s.e.m. Data reflect 4 independent FACS sessions with cells harvested from 5 mice (FIGS. 12A, 12B, 12C, 12F, 12G) or 6 mice (FIGS. 12D, 12E, 12H) per each protein and 4 independent flow cytometry analyses. *p<0.05, (two-tailed Student's t-test).

### DETAILED DESCRIPTION

[0043] Briefly, the methods and compositions described herein relate to methods and agents for treating or preventing a gastrointestinal disease. In one aspect, the method comprises: administering to a subject in need thereof an agent that increases the level or activity of Free Fatty Acid Receptor 2 (Ffar2) in the subject.

### Some Selected Definitions:

[0044] For convenience, the meaning of some terms and phrases used in the specification, examples, and appended claims, are provided below. Unless stated otherwise, or implicit from context, the following terms and phrases include the meanings provided below. The definitions are provided to aid in describing particular embodiments, and are not intended to limit the claimed technology, because the scope of the technology is limited only by the claims. Unless otherwise defined, all technical and scientific terms used herein have the same meaning as commonly understood by one of ordinary skill in the art to which this technology belongs. If there is an apparent discrepancy between the usage of a term in the art and its definition provided herein, the definition provided within the specification shall prevail.

[0045] Definitions of common terms in immunology and molecular biology can be found in The Merck Manual of Diagnosis and Therapy, 19th Edition, published by Merck Sharp & Dohme Corp., 2011 (ISBN 978-0-911910-19-3); Robert S. Porter et al. (eds.), The Encyclopedia of Molecular Cell Biology and Molecular Medicine, published by Blackwell Science Ltd., 1999-2012 (ISBN 9783527600908); and Robert A. Meyers (ed.), Molecular Biology and Biotechnology: a Comprehensive Desk Reference, published by VCH Publishers, Inc., 1995 (ISBN 1-56081-569-8); Immunology by Werner Luttmann, published by Elsevier, 2006; Janeway's Immunobiology, Kenneth Murphy, Allan Mowat, Casey Weaver (eds.), Taylor & Francis Limited, 2014 (ISBN 0815345305, 9780815345305); Lewin's Genes XI, published by Jones & Bartlett Publishers, 2014 (ISBN-1449659055); Michael Richard Green and Joseph Sambrook, Molecular Cloning: A Laboratory Manual, 4th ed., Cold Spring Harbor Laboratory Press, Cold Spring Harbor, N.Y., USA (2012) (ISBN 1936113414); Davis et al., Basic Methods in Molecular Biology, Elsevier Science Publishing, Inc., New York, USA (2012) (ISBN 044460149X); Laboratory Methods in Enzymology: DNA, Jon Lorsch (ed.) Elsevier, 2013 (ISBN 0124199542); Current Protocols in Molecular Biology (CPMB), Frederick M. Ausubel (ed.), John Wiley and Sons, 2014 (ISBN 047150338X, 9780471503385), Current Protocols in Protein Science (CPPS), John E. Coligan (ed.), John Wiley and Sons, Inc., 2005; and Current Protocols in Immunology (CPI) (John E. Coligan, ADA M Kruisbeek, David H Margulies, Ethan M Shevach, Warren Strobe, (eds.) John Wiley and Sons, Inc., 2003 (ISBN 0471142735, 9780471142737), the contents of which are all incorporated by reference herein in their entireties.

[0046] As used herein, the terms “treat,” “treatment,” “treating,” or “amelioration” refer to therapeutic treatments, wherein the object is to reverse, alleviate, ameliorate, inhibit, slow down or stop the progression or severity of a condition associated with gastrointestinal disease, e.g. ulcerative colitis. The term “treating” includes reducing or alleviating at least one adverse effect or symptom of gastrointestinal disease, for example, diarrhea, bleeding, loss of appetite, discomfort, or vomiting. Treatment is generally “effective” if one or more symptoms or clinical markers are reduced. Alternatively, treatment is “effective” if the progression of a disease is reduced or halted. That is, “treatment” includes not just the improvement of symptoms or markers, but also a cessation of, or at least slowing of, progress or worsening of symptoms compared to what would be expected in the absence of treatment. Beneficial or desired clinical results include, but are not limited to, alleviation of one or more symptom(s), diminishment of extent of disease, stabilized (i.e., not worsening) state of disease, delay or slowing of disease progression, amelioration or palliation of the disease state, remission (whether partial or total), and/or decreased mortality, whether detectable or undetectable. The term “treatment” of a disease also includes providing relief from the symptoms or side-effects of the disease (including palliative treatment).

[0047] As used herein “preventing” or “prevention” refers to any methodology where the disease state does not occur due to the actions of the methodology (such as, for example, administration of an agent as described herein). In one aspect, it is understood that prevention can also mean that the disease is not established to the extent that occurs in untreated controls. Accordingly, prevention of a disease encompasses a reduction in the likelihood that a subject can develop the disease, relative to an untreated subject (e.g. a subject who is not treated with the methods or compositions described herein).

[0048] As used herein, the terms “administering,” and “injecting” are used interchangeably in the context of the placement of an agent (e.g. a small molecule) described herein, into a subject, by a method or route which results in at least partial localization of the agent at a desired site, such as the gastrointestinal tract or a region thereof, such that a desired effect(s) is produced (e.g., increase Ffar2 level or activity). The agent described herein can be administered by any appropriate route which results in delivery to a desired location in the subject. The half-life of the agent after administration to a subject can be as short as a few minutes, hours, or days, e.g., twenty-four hours, to a few days, to as long as several years, i.e., long-term. In some embodiments of any of the aspects, the term “administering” refers to the administration of a pharmaceutical composition comprising one or more agents. The administering can be done by direct injection (e.g., directly administered to a target cell or tissue), subcutaneous injection, muscular injection, oral, or nasal delivery to the subject in need thereof. Administering can be local or systemic.

[0049] The terms “patient”, “subject” and “individual” are used interchangeably herein, and refer to an animal, particularly a human, to whom treatment, including prophylactic treatment is provided. The term “subject” as used herein refers to human and non-human animals. The term “non-human animals” and “non-human mammals” are used interchangeably herein includes all vertebrates, e.g., mammals, such as non-human primates, (particularly higher primates), sheep, dog, rodent (e.g. mouse or rat), guinea pig, goat, pig, cat, rabbits, cows, and non-mammals such as chickens, amphibians, reptiles etc. In one embodiment of any of the aspects, the subject is human. In another embodiment, of any of the aspects, the subject is an experimental animal or animal substitute as a disease model. In another embodiment, of any of the aspects, the subject is a domesticated animal including companion animals (e.g., dogs, cats, rats, guinea pigs, hamsters etc.). A subject can have previously received a treatment for a gastrointestinal disease, or has never received treatment for a gastrointestinal disease. A subject can have previously been diagnosed with having a gastrointestinal disease, or has never been diagnosed with a gastrointestinal disease.

[0050] The term “agent” as used herein means any compound or substance such as, but not limited to, a small molecule, nucleic acid, polypeptide, peptide, drug, ion, short chain fatty acid (SCFA), etc. An “agent” can be any chemical, entity or moiety, including without limitation, synthetic and naturally-occurring proteinaceous and non-proteinaceous entities. In some embodiments of any of the aspects, an agent is nucleic acid, nucleic acid analogues, proteins, antibodies, peptides, aptamers, oligomer of nucleic acids, amino acids, or carbohydrates including without limitation proteins, oligonucleotides, ribozymes, DNAzymes, glycoproteins, siRNAs, lipoproteins, aptamers, and modifications and combinations thereof etc. In certain embodiments, agents are small molecule having a chemical moiety. For example, chemical moieties included unsubstituted or substituted alkyl, aromatic, or heterocyclyl moieties including macrolides, leptomycins and related natural products or analogues thereof. Compounds can be known to have a desired activity and/or property, or can be selected from a library of diverse compounds.

[0051] The agent can be a molecule from one or more chemical classes, e.g., organic molecules, which may include organometallic molecules, inorganic molecules, genetic sequences, etc. Agents may also be fusion proteins from one or more proteins, chimeric proteins (for example domain switching or homologous recombination of functionally significant regions of related or different molecules), synthetic proteins or other protein variations including substitutions, deletions, insertion and other variants.

[0052] The term “derivative” as used herein means any chemical, conservative substitution, or structural modification of an agent. The derivative can improve characteristics of the agent or small molecule such as pharmacodynamics, pharmacokinetics, absorption, distribution, delivery, targeting to a specific receptor, or efficacy. For example, for a small molecule, the derivative can consist essentially of at least one chemical modification to about ten modifications. The derivative can also be the corresponding salt of the agent (e.g. sodium propionate as a derivative of propionate). The derivative can be the pro-drug of the small molecule as described herein.

[0053] The terms “decrease”, “reduced”, “reduction”, or “inhibit” are all used herein to mean a decrease or lessening of a property, level, or other parameter by a statistically significant amount. In some embodiments, “reduce,” “reduction” or “decrease” or “inhibit” typically means a decrease by at least 10% as compared to a reference level (e.g., the absence of a given treatment) and can include, for example, a decrease by at least about 10%, at least about 20%, at least about 25%, at least about 30%, at least about 35%, at least about 40%, at least about 45%, at least about 50%, at least about 55%, at least about 60%, at least about 65%, at least about 70%, at least about 75%, at least about 80%, at least about 85%, at least about 90%, at least about 95%, at least about 98%, at least about 99%, or more. As used herein, “reduction” or “inhibition” does not encompass a complete inhibition or reduction as compared to a reference level. “Complete inhibition” is a 100% inhibition as compared to a reference level. A decrease can be preferably down to a level accepted as within the range of normal for an individual without a given disorder.

[0054] The terms “increased,” “increase,” “increases,” or “enhance” or “activate” are all used herein to generally mean an increase of a property, level, or other parameter by a statistically significant amount; for the avoidance of any doubt, the terms “increased”, “increase” or “enhance” or “activate” means an increase of at least 10% as compared to a reference level, for example an increase of at least about 20%, or at least about 30%, or at least about 40%, or at least about 50%, or at least about 60%, or at least about 70%, or at least about 80%, or at least about 90% or up to and including a 100% increase or any increase between 10-100% as compared to a reference level, or at least about a 2-fold, or at least about a 3-fold, or at least about a 4-fold, or at least about a 5-fold or at least about a 10-fold increase, at least about a 20-fold increase, at least about a 50-fold increase, at least about a 100-fold increase, at least about a 1000-fold increase or more as compared to a reference level. For example, increasing activity can refer to activating Ffar2 receptors or increasing levels of Ffar2 directly or indirectly.

[0055] As used herein, a “reference level” refers to a normal, otherwise unaffected cell population or tissue (e.g., a biological sample obtained from a healthy subject, or a biological sample obtained from the subject at a prior time point, e.g., a biological sample obtained from a patient prior to being diagnosed with a gastrointestinal disease, or a biological sample that has not been contacted with an agent or composition disclosed herein).

[0056] As used herein, an “appropriate control” refers to an untreated, otherwise identical cell or population (e.g., a biological sample that was not contacted by an agent or composition described herein, or not contacted in the same manner, e.g., for a different duration, as compared to a non-control cell). In some embodiments of any of the aspects, an appropriate control would be the level of Ffar2 activity in an otherwise identical sample that is not contacted by an agent or composition described herein, or is the level of Ffar2 activity in a subject prior to administration of an agent or composition. Further, an appropriate control can be the level of Ffar2 activity in a healthy subject, e.g., an individual that does not have a gastrointestinal disease. One skilled in the art can determine the activity of Ffar2 using functional readouts of Ffar2's activity, for example, by measuring/assessing the secretion of IL-22. One skilled in the art can assess/measure the protein and mRNA levels of Ffar2 and downstream targets or secretions from the cells of interest, e.g., using western blotting or PCR-based assays, respectively.

[0057] The term “pharmaceutically acceptable” can refer to compounds and compositions which can be administered to a subject (e.g., a mammal or a human) without undue toxicity.

[0058] As used herein, the term “secreting” or “secretion” are used interchangeably to refer to the ability of a cell or tissue to release a protein, molecule, nucleic acid, or vesicle. For example, ILC3s can secrete interleukins (e.g. IL-22), small proteins of ˜5-20 kDa that modulate cell signaling such as immune responses to infections.

[0059] As used herein, “detecting” is understood to mean that an assay was performed for a specific target or protein (e.g. Ffar2). The amount of target detected can be none or below the level of detection of the assay. Examples of assays include but are not limited to, flow cytometry, immunohistochemistry, real time or reverse transcriptase-PCR, Western blotting, enzyme-linked immunosorbent assay (ELISA), or any other assay known in the art.

[0060] As used herein, the term “modulates” refers to an effect including increasing or decreasing a given parameter as those terms are defined herein.

[0061] As used herein, the term “contacting” when used in reference to a cell or organ, encompasses both introducing or administering an agent, surface, hormone, etc. to the cell, tissue, or organ in a manner that permits physical contact of the cell with the agent, surface, hormone etc., and introducing an element, such as a genetic construct or vector, that permits the expression of an agent, such as a miRNA, polypeptide, or other expression product in the cell. It should be understood that a cell genetically modified to express an agent, is “contacted” with the agent, as are the cell's progeny that express the agent.

[0062] The term “statistically significant” or “significantly” refers to statistical significance and generally means a two standard deviation (2SD) or greater difference.

[0063] As used herein, the term “comprising” means that other elements can also be present in addition to the defined elements presented. The use of “comprising” indicates inclusion rather than limitation.

[0064] The term “consisting of” refers to compositions, methods, and respective components thereof as described herein, which are exclusive of any element not recited in that description of the embodiment.

[0065] As used herein the term “consisting essentially of” refers to those elements required for a given embodiment. The term permits the presence of additional elements that do not materially affect the basic and novel or functional characteristic(s) of that embodiment of the invention.

[0066] The singular terms “a,” “an,” and “the” include plural referents unless context clearly indicates otherwise. Similarly, the word “or” is intended to include “and” unless the context clearly indicates otherwise. Although methods and materials similar or equivalent to those described herein can be used in the practice or testing of this disclosure, suitable methods and materials are described below. The abbreviation, “e.g.” is derived from the Latin exempli gratia, and is used herein to indicate a non-limiting example. Thus, the abbreviation “e.g.” is synonymous with the term “for example.”

[0067] Further, unless otherwise required by context, singular terms shall include pluralities and plural terms shall include the singular.

[0068] Other than in the operating examples, or where otherwise indicated, all numbers expressing quantities of ingredients or reaction conditions used herein should be understood as modified in all instances by the term “about.” The term “about” when used in connection with percentages can mean±1%.

[0069] Unless otherwise explained, all technical and scientific terms used herein have the same meaning as commonly understood by one of ordinary skill in the art to which this disclosure belongs.

[0070] It should be understood that this disclosure is not limited to the particular methodology, protocols, and reagents, etc., described herein and as such may vary. The terminology used herein is for the purpose of describing particular embodiments only, and is not intended to limit the scope of the present disclosure, which is defined solely by the claims.

[0071] All patents and other publications identified are expressly incorporated herein by reference for the purpose of describing and disclosing, for example, the methodologies described in such publications that might be used in connection with the present disclosure. These publications are provided solely for their disclosure prior to the filing date of the present application. Nothing in this regard should be construed as an admission that the inventors are not entitled to antedate such disclosure by virtue of prior disclosure or for any other reason. All statements as to the date or representation as to the contents of these documents are based on the information available to the applicants and do not constitute any admission as to the correctness of the dates or contents of these documents.

### Innate Lymphoid Cell Function in the Gut:

[0072] The innate lymphoid cell (ILC) family plays a significant role in immunity, inflammation, tissue homeostasis, and repair. Generally, ILCs are classified into three groups on the basis of signature transcription factors and distinct effector cytokines: Group 1 ILCs (TLC's) require T-bet and produce interferon-γ (IFN-γ), Group 2 ILCs (ILC2s) express GATA3 and produce the type 2 cytokines interleukin 5 (IL-5) and IL-13, and Group 3 ILCs (ILC3s) are a heterogeneous population expressing transcription factor RAR-related orphan receptor gamma t (RORγt) and have the ability to produce IL-22 and/or IL-17.

[0073] ILC3s are enriched in the intestine, where they maintain gut homeostasis by orchestrating: lymphoid organ development, containment of commensal bacterial, tissue repair, host defense and regulation of adaptive immunity. ILC3s process signals from other cells and soluble mediators within their local tissue microenvironment. Environmental cues, such as microbial, dietary, and neuronal signals, regulate ILC3s through cell-intrinsic receptors.

[0074] As used herein, the terms “group 3 innate lymphoid cells” or “innate lymphoid cells” or “ILC3s” are used interchangeably to refer to immune cells in the gut responsible for maintaining tissue function, immunity, and repair. Innate lymphoid cells (ILCs) are classified into three groups on the basis of signature transcription factors and distinct effector cytokines: Group 1 ILCs (ILC1s) consist essentially of T-bet and produce interferon-γ (IFN-γ), Group 2 ILCs (ILC2s) consist essentially of GATA3 and produce the type 2 cytokines interleukin 5 (IL-5) and IL-13, and Group 3 ILCs (ILC3s) consist essentially of a heterogeneous population expressing transcription factor RAR-related orphan receptor gamma t (RORγt) and have the ability to produce IL-22 and/or IL-17. ILC3s are typically enriched in the intestine, where they maintain gut homeostasis by orchestrating: lymphoid organ development, containment of commensal bacterial, tissue repair, host defense and regulation of adaptive immunity. ILC3s can on occasion be divided into two subsets based on CC chemokine receptor type 6 (CCR6) expression. Both CCR6+ ILC3s and CCR6− ILC3s produce IL-22, a key cytokine that is essential for recovery from tissue damage and protection against intracellular bacteria. ILC3 proliferation as described herein can be necessary for protection from infection.

[0075] In one aspect, described herein is a method of increasing the levels of ILC3s in the gastrointestinal tract, the method comprises: administering an agent that increases the level or activity of Ffar2.

[0076] In one embodiment of any of the aspects, the agent protects from an infection or inflammation.

[0077] In another embodiment of any of the aspects, the agent described herein induces an increase in the number of group 3 innate lymphoid cells (ILC3s). In another embodiment, of any of the aspects, the agent induces an increase in T-regulatory cells (Tregs). In another embodiment of any of the aspects, the ILC3s are CC chemokine receptor type 6 (CCR6) positive or CCR6 negative cells. The ILC3s as described herein can be present in any tissue in the body or systemically. Exemplary tissues where ILC3s are present include but are not limited the esophagus, stomach, small intestine, large intestine, or colon.

[0078] ILC3s can be characterized by any method known in the art such as flow cytometry, immunohistochemistry, real time PCR using cell surface markers, transcription factors, or secretions specific to ILC3s. Markers of ILC3s include but are not limited to Ffar2, cluster of differentiation (CD) CD45, CD90.2, CD11b, CD11c, protein gamma response 1 (Gr-1), major histocompatibility complex (MHC) MHC Class II, Killer cell lectin-like receptor subfamily G member 1 (KLRG1), CD3c, CD4, interleukins (IL) IL-22, IL-17, CCR6, Aryl hydrocarbon receptor (Ahr), RAR-related orphan receptor gamma (RORγ), RORγt, IL-1β, interferon γ (IFN γ) or any other ILC3 marker known in the art.

[0079] In the context of the methods described herein, the term “functional property,” as applied to an innate lymphoid cell(s), ILC3s, or culture of ILC3s, refers to any of the parameters described herein as measures of innate lymphoid cell function or ILC3 function. A “change in functional property” as described herein is indicated by a statistically significant increase or decrease in a functional property with respect to a reference level or appropriate control.

[0080] In addition to ILC3s, the gastrointestinal tract can comprise other immune cells, such as regulatory T cells or “T_{regs}.” T_{regs} are a subpopulation of T cells that modulate the immune system, and prevent infections (e.g. gastrointestinal infections). The T_{regs} express biomarkers CD4, Fox3P, and CD25. T_{regs} can be found in the colon. T_{regs} produce and secrete a number of cytokines including IL-35 and IL-10 that regulate immune cell function. As described in the working examples, Ffar2 can also regulate T_{reg} cell function and expansion in the colon.

### Ffar2 and Gut Homeostasis:

[0081] In one aspect, described herein is a method of increasing the level or activity of FFar2 in a subject.

[0082] The Free Fatty Acid Receptor 2 (Ffar2, Ffar2 receptor, GPR43) is a G-protein coupled receptor that is expressed in the gut, adipose tissue, pancreas, spleen, lymph nodes, bone marrow, and peripheral blood mononuclear cells, among others. Specifically, Ffar2 can couple with G_{i/o} or G_{q} proteins and Ffar2 activation can inhibit cAMP and/or stimulate Ca²⁺ influx, eliciting intracellular signal cascades that regulate numerous cell-specific functions. For example, Ffar2 is involved in cell signaling events related to inflammation in response to infections, injury, and the like. Sequences for FFAR2, also known as GPR43, are known for a number of species, e.g., human FFAR2 (NCBI Gene ID: 2867 and NCBI Reference Sequence NC_000019.10) polypeptide and mRNA (e.g., NCBI Reference Sequence: NM_005306.2). Ffar2 can refer to human Ffar2, including naturally occurring variants, molecules, genetically engineered Ffar2, and alleles thereof. Ffar2 refers to the mammalian Ffar2 of, e.g., mouse, rat, rabbit, dog, cat, cow, horse, pig, and the like. The amino acid sequence of Ffar2 is shown in SEQ ID NO: 1. The gene sequence is shown in SEQ ID NO: 2.

[0083] Of the hundreds of bacterial metabolites in the gut, short-chain fatty acids (SCFAs) have emerged as substantial regulators of immune responses in the gut and systemically. SCFAs, which are produced in the colon through bacterial fermentation of dietary fiber can engage ‘metabolite-sensing’ G-protein-coupled receptors (GPCRs).

[0084] Ffar2 is a SCFA-sensing GPCR, and the functions of Ffar2 are broadly immunomodulatory. FFar2 plays a useful role in gut homeostasis and regulation of inflammation. Ffar2 also mediates colonic T_{reg} cell expansion and protects against T-cell transfer colitis.

[0085] Provided herein are methods related to Ffar2 signaling that affect colonic ILC3 proliferation and function in a cell-intrinsic manner. The methods described herein can modulate ILC3 regulation of gut inflammatory tone and pathogen defense.

[0086] As used herein, the terms “Ffar2 activity” or “activity of Ffar2” refers to the cellular functions of the Ffar2 receptor, for example, activation of Ffar2 in Group 3 innate lymphoid cells (ILC3s) results in the secretion of interleukins 22 (IL-22) and 17 (IL-17). As described herein, an increase in Ffar2 levels and activity results in the expansion of ILC3 populations in the gut. Ffar2 activity can further refer to the sensing of microorganism metabolites, maintenance of gut homeostasis, and resistance to infection. The activation of Ffar2 or an increase in Ffar activity as described herein can also refer to the secretion of other immunomodulatory molecules and proteins such as cytokines, interferons, and complement. Exemplary immunomodulatory molecules and proteins include but are not limited to IL-22, IL-17, IFNγ, granulocyte-macrophage colony-stimulating factor (GM-CSF), lymphotoxin (LT) alpha, and LT beta.

[0087] In one embodiment of any of the aspects, the agent described herein induces secretion of interleukin-22 (IL-22) and/or interleukin-17 (IL-17) from ILC3s. In another embodiment, of any of the aspects, the agent described herein induces secretion of IFNγ or IL-1β.

[0088] In another embodiment of any of the aspects, activating Ffar2 is increasing Ffar2 activity. The Ffar2 activity can be any function of the FFAR2 gene, gene product, or polypeptide, e.g., increased secretion of IL-22 by ILC3s. In another embodiment of any of the aspects, the activity of Ffar2 is increased by at least 5%, 10%, 15%, 20%, 25%, 30%, 35%, 40%, 45%, 50%, 55%, 60%, 65%, 70%, 75%, 80%, 85%, 90%, 95%, 99%, or more as compared to an appropriate control.

[0089] In another embodiment, of any of the aspects, activating Ffar2 is increasing Ffar2 levels in the cell, e.g., gene expression levels or gene product levels. In one embodiment of any of the aspects, Ffar2 levels are increased by at least 5%, 10%, 15%, 20%, 25%, 30%, 35%, 40%, 45%, 50%, 55%, 60%, 65%, 70%, 75%, 80%, 85%, 90%, 95%, 99%, or more as compared to an appropriate control.

### Gastrointestinal Diseases:

[0090] In one aspect of any of the embodiments, the methods, assays, and compositions described herein can be used to treat or prevent a gastrointestinal disease in a subject.

[0091] In another aspect of any of the embodiments, the methods described herein are methods and compositions for treating a subject having or diagnosed as having a gastrointestinal disease. The methods described herein comprise administering an agent that increases the levels or activity of Ffar2 as described herein.

[0092] In another aspect, described herein is a method of reducing inflammation in the gastrointestinal tract of a subject, the method comprises: administering to a subject an agent that increases the level or activity of Free Fatty Acid Receptor 2 (Ffar2) in the subject.

[0093] Subjects having a gastrointestinal disease can be identified by a physician using current methods of diagnosing a condition. Symptoms and/or complications of a gastrointestinal disease, which characterize this disease and aid in diagnosis are well known in the art and include but are not limited to, fatigue, pain, vomiting, nausea, upset stomach, diarrhea, etc. Tests that may aid in a diagnosis of, e.g. a gastrointestinal disease, include but are not limited example blood tests, non-invasive imaging, and/or tissue biopsy. A family history of a gastrointestinal disease will also aid in determining if a subject is likely to have the condition or in making a diagnosis of a gastrointestinal disease. Furthermore, a blood test or tissue biopsy will aid in diagnosing a gastrointestinal infection and which microorganism is responsible for said infection.

[0094] The methods and compositions described herein can further be used to treat or prevent other diseases in organs where Ffar2 is present. For example, such diseases would include but are not limited to, diabetes, obesity, pancreatitis, splenic rupture, biliary diseases, and the like.

[0095] As used herein the term “gastrointestinal disease” or “GI disease” refers to any disease that affects the gastrointestinal tract or gut. The gastrointestinal disease can cause at least one symptom of the disease. These symptoms can include but are not limited to, diarrhea, vomiting, nausea, upset stomach, pain, malaise, fever, weight loss, weight gain, bleeding, any change in the consistency or frequency of a bowel movement or stool, or any other symptom associated with a gastrointestinal disease in a subject. Non-limiting examples of gastrointestinal diseases include a gastrointestinal infection, inflammatory bowel disease (IBD), gastrointestinal injury, appendicitis, Crohn's disease (CD), ulcerative colitis (UC), gastritis, enteritis, esophagitis, gastroesophageal reflux disease (GERD), celiac disease, diverticulitis, food intolerance, ulcer, infectious colitis, irritable bowel syndrome, and cancer.

[0096] In one embodiment of any of the aspects, the administering of the agent as described herein reduces inflammation of the gastrointestinal tract.

[0097] As used herein, the term “inflammation” or “inflamed” refers to activation or recruitment of the immune system or immune cells (e.g. T cells, B cells, macrophages, etc.). A tissue that has inflammation can become reddened, white, swollen, hot, painful, exhibit a loss of function, or have a film or mucus. Methods of identifying inflammation are well known in the art. Inflammation typically occurs following injury or infection by a microorganism.

[0098] In some embodiments of any of the aspects, the gastrointestinal disease described herein is selected from the group consisting of: a gastrointestinal infection, inflammatory bowel disease (IBD), gastrointestinal injury, appendicitis, Crohn's disease (CD), ulcerative colitis (UC), gastritis, enteritis, esophagitis, gastroesophageal reflux disease (GERD), celiac disease, diverticulitis, food intolerance, ulcer, infectious colitis, irritable bowel syndrome, and cancer.

[0099] In some embodiments of any of the aspects, the gastrointestinal infection described herein is due to a microorganism. In another embodiment of any of the aspects, the microorganism is a bacterium, virus, fungus, parasite, yeast, prion, or any other microorganism known in the art.

[0100] As used herein, the term “microbe” or “microorganism” refers to an organism which is microscopic. A microbe can be a single-celled organism. In some embodiments of any of the aspects, a microbe is a bacterium. As used herein, the term “pathogen” refers to an organism or molecule that causes a disease or disorder in a subject. For example, pathogens include but are not limited to viruses, fungi, bacteria, parasites and other infectious organisms, or molecules therefrom, as well as taxonomically related macroscopic organisms within the categories algae, fungi, yeast and protozoa or the like.

[0101] In another embodiment of any of the aspects, the bacterium is a Clostridium, Staphylococcus, Streptococcus, Escherichia (e.g. E. coli), Mycobacterium, Pseudomonas, Burkholderiz, Trichomonas, Campylobacter, Shigella, Salmonella, Citrobacter, their species, or any other bacteria known in the art. In another embodiment of any of the aspects, the virus is influenza virus, coronavirus, retrovirus, or any other virus known in the art.

[0102] In one aspect of any embodiment, described herein is a method for treating or preventing a gastrointestinal disease, the method comprises: administering to a subject in need thereof an agent that increases the level or activity of Free Fatty Acid Receptor 2 (Ffar2) in the subject.

[0103] In another embodiment of any of the aspects, the subject has been previously diagnosed with having a gastrointestinal disease. In another embodiment of any of the aspects, the subject is diagnosed with a gastrointestinal disease prior to the administering of the agent. In another embodiment of any of the aspects, the subject is a mammal. In another embodiment of any of the aspects, the subject is a human.

### Agents

[0104] In one aspect, described herein is method of treating or preventing a gastrointestinal disease, the method comprises: administering to a subject an agent that increases the level or activity of Ffar2.

[0105] In one embodiment of any of the aspects, the agent preferentially binds to a Ffar2 receptor. In some embodiments of any of the aspects, the agent is an agonist of Ffar2, a partial agonist of Ffar2, or an allosteric modulator of Ffar2.

[0106] Efficacy of the agent or compositions described herein can be quantitated in several ways based on functional data as described herein (e.g. IL-22 secretion). The agent affinity for Ffar2 can be characterized by a dissociation constant (Kd). The Kd of the agent for the Ffar2 receptor can be about 5×10⁻² M, about 10⁻² M, about 5×10⁻³ M, about 10⁻³ M, about 5×10⁻⁴ M, about 10⁻⁴ M, about 5×10⁻⁵ M, about 10⁻⁵ M, about 5×10⁻⁶ M, about 10⁻⁶ M, about 5×10⁻⁷ M, about 10⁻⁷ M, about 5×10⁻⁸ M, about 10⁻⁸ M, about 5×10⁻⁹ M, about 10⁻⁹ M, about 5×10⁻¹⁰ M, about 10⁻¹⁰ M, about 5×10⁻¹¹ M, about 10⁻¹¹ M, about 5×10⁻¹² M, about 10⁻¹² M, about 5×10⁻¹³ M, about 10⁻¹³ M, about 5×10⁻¹⁴ M, about 10⁻¹⁴ M, about 5×10⁻¹⁵ M, or about 10⁻¹⁵ M.

[0107] In another aspect of any embodiment, an agent that increases Ffar2 levels or activity is administered to a subject having or at risk of having a gastrointestinal disease.

[0108] In one embodiment of any of the aspects, the agent is selected from the group consisting of: a small molecule, an antibody, a peptide, a genome editing system, a vector, a nucleic acid, a miRNA, and a siRNA.

[0109] An agent described herein is considered effective for increasing the levels or activity of Ffar2 if, for example, upon administration, it increases the presence, amount, activity and/or level of Ffar2 in a cell.

[0110] An agent can increase or activate e.g., the transcription, or the translation of Ffar2 in the cell. An agent can increase the activity or alter the activity (e.g., such that the activity increases, is enhanced or occurs properly (e.g., as compared to wild-type Ffar2 activity), or occurs at an increased rate) of Ffar2 in the cell (e.g., Ffar2's expression).

[0111] The agent can function directly in the form in which it is administered. Alternatively, the agent can be modified or utilized intracellularly to produce something which increases Ffar2, such as introduction of a nucleic acid sequence into the cell and its transcription resulting in the production of the nucleic acid and/or protein agonist, partial agonist, modulator, or activator of Ffar2 within the cell.

[0112] In some embodiments of any of the aspects, the agent is any chemical, entity or moiety, including without limitation, synthetic and naturally-occurring non-proteinaceous entities. In certain embodiments, of any of the aspects, the agent is a small molecule having a chemical moiety. For example, chemical moieties included unsubstituted or substituted alkyl, aromatic, or heterocyclyl moieties including macrolides, leptomycins and related natural products or analogues thereof. Agents can be known to have a desired activity and/or property, or can be identified from a library of diverse compounds.

[0113] As used herein, the term “small molecule” refers to a chemical agent which can include, but is not limited to, a short chain fatty acid, a peptide, a peptidomimetic, an amino acid, an amino acid analog, a polynucleotide, a polynucleotide analog, an aptamer, a nucleotide, a nucleotide analog, an organic or inorganic compound (e.g., including heterorganic and organometallic compounds) having a molecular weight less than about 10,000 grams per mole, organic or inorganic compounds having a molecular weight less than about 5,000 grams per mole, organic or inorganic compounds having a molecular weight less than about 1,000 grams per mole, organic or inorganic compounds having a molecular weight less than about 500 grams per mole, and salts, esters, and other pharmaceutically acceptable forms of such compounds.

[0114] In some embodiments of any of the aspects, the small molecule is a short chain fatty acid (SCFA). As used herein, the term “short chain fatty acid” or “SCFA” refers to a fatty acid or carboxylic acid consisting essentially of two to about ten carbon atoms in the carbon backbone and salts, esters, and pro-drugs thereof. Non-limiting examples of short chain fatty acids include propionic acid, acetic acid, butyric acid, formic acid, isobutyric acid, valeric acid, isovaleric acid, formate, acetate, propionate, butyrate, pentanoate, isobutyrate, valerate, isovalerate and pharmaceutically acceptable salts thereof (e.g. sodium propionate). SCFA or SCFAs can also refer to a mixture of propionic acid, acetic acid, and/or butyric acid.

[0115] In some embodiments of any of the aspects, the small molecule is a derivative of a SCFA. In some embodiments of any of the aspects, a pharmaceutical composition comprises a SCFA or mixture of SCFAs. In some embodiments of any of the aspects, SCFAs comprise a mixture of propionic acid, acetic acid, and/or butyric acid. In some embodiments of any of the aspects, the SCFAs can be engineered, synthesized, isolated, or processed. In some embodiments of any of the aspects, the SCFA is a pro-drug. In some embodiments of any of the aspects, SCFAs are isolated or produced by a living cell.

[0116] In some embodiments of any of the aspects, the small molecule is ES43012-SOD, trans-2-methylcrotonic acid, propiolic acid, angelic acid, compound 34, sodium acetate, sodium propionate, sodium butyrate, formate, pentanoate, (S)-2-(4-chlorophenyl)-3,3-dimethyl-N-(5-phenylthiazol-2-yl)butanamide, BTI-A-404, BTI-A-292, AZ1729, or any derivative thereof.

[0117] In some embodiments of any of the aspects, the small molecules described herein can preferentially bind or activate Ffar2 to increase Ffar2 levels and/or activity. For example, ES43012-SOD is a FFar2 agonist that, as provided herein, selectively promotes an increase in colonic ILC3 population frequency and number.

[0118] In some embodiments, the agent is ES43012-SOD or any derivative, or analog, thereof. In some embodiments, the agent described herein is Compound 1 in Patent Application Number: WO2011/076732 A1; which is incorporated herein by reference in its entirety.

[0119] Non-limiting examples of small molecules, peptides, and recombinant proteins that modulate Ffar2 activity are shown in TABLE 1 below. The small molecules, peptides, and recombinant proteins can be used in any combination and combined with any other agent or pharmaceutical composition described herein.

TABLE 1
Chemicals, Peptides, and Recombinant Proteins

| REAGENT or RESOURCE | SOURCE | IDENTIFIER |
|---|---|---|
| Ffar agonist | EPICS SA, Belgium | Compound 1- |
| | | WO2011/076732 A1 |
| Sodium Acetate | Sigma-Aldrich | S8750 |
| Sodium Propionate | Sigma-Aldrich | P5436 |
| Sodium Butyrate | Sigma-Aldrich | 303410 |
| Dithiothreitol | Sigma-Aldrich | 00-5523-00 |
| Penicillin/streptomycin | Corning | 30-002-CI |
| Collagenase D | Roche | 11088882001 |
| Collagenase A | Roche | 10103586001 |
| DNase I | Roche | 10104159001 |
| Dispase | StemCell | 07913 |
| | Technologies | |
| Phorbol mysristate acetate | Sigma-Aldrich | P8139-1MG |
| Ionomycin | Sigma-Aldrich | I0634-1MG |
| Brefeldin A Solution | BioLegend | 420601 |
| QIAzol | QIAGEN | 79306 |
| RNAlater | Sigma-Aldrich | R0901-100ML |
| Mm-Ffar2 probe | ACDBio | 433711 |
| TSA cyanine 3 | PerkinElmer | NEL744E001KT |
| TSA cyanine 5 | PerkinElmer | NEL745E001KT |
| Prolong Gold antifade | Life Technologies | P36934 |
| mounting | | |
| FITC dextran | Sigma-Aldrich | 46944-500MG-F |
| DSS | Thermo Scientific | J1448922 |
| Pertussis Toxin | Calbiochem | CAS 70323-44-3 |
| YM-254890 | Focus Biomolecules | 10-1590-0100 |
| AKT1/2 kinase inhibitor | Sigma-Aldrich | A6730-5MG |
| (VIII) | | |
| ERK kinase inhibitor | Sigma-Aldrich | P215-1MG |
| (PD98059) | | |
| STAT3 inhibitor | Sigma-Aldrich | SML0330-5MG |
| (S3I-201) | | |

[0120] Methods for screening small molecules are known in the art and can be used to identify a small molecule that is efficient at, for example, modulating Ffar2 activity or levels, given the desired target (e.g., Ffar2 receptor).

[0121] In various embodiments of any of the aspects, the agent is an antibody or antigen-binding fragment thereof, or an antibody reagent that is specific for Ffar2 or a regulator of Ffar2. As used herein, the term “antibody reagent” refers to a polypeptide that includes at least one immunoglobulin variable domain or immunoglobulin variable domain sequence and which specifically binds a given antigen. An antibody reagent can comprise an antibody or a polypeptide comprising an antigen-binding domain of an antibody. In some embodiments of any of the aspects, an antibody reagent can comprise a monoclonal antibody or a polypeptide comprising an antigen-binding domain of a monoclonal antibody. For example, an antibody can include a heavy (H) chain variable region (abbreviated herein as VH), and a light (L) chain variable region (abbreviated herein as VL). In another example, an antibody includes two heavy (H) chain variable regions and two light (L) chain variable regions. The term “antibody reagent” encompasses antigen-binding fragments of antibodies (e.g., single chain antibodies, Fab and Fab fragments, F(ab′)2, Fd fragments, Fv fragments, scFv, CDRs, and domain antibody (dAb) fragments (see, e.g. de Wildt et al., Eur J. Immunol. 1996; 26(3):629-39; which is incorporated by reference herein in its entirety)) as well as complete antibodies. An antibody can have the structural features of IgA, IgG, IgE, IgD, or IgM (as well as subtypes and combinations thereof). Antibodies can be from any source, including mouse, rabbit, pig, rat, and primate (human and non-human primate) and primatized antibodies. Antibodies also include midibodies, nobodies, humanized antibodies, chimeric antibodies, and the like.

[0122] In one embodiment of any of the aspects, the agent is a humanized, monoclonal antibody or antigen-binding fragment thereof, or an antibody reagent. As used herein, “humanized” refers to antibodies from non-human species (e.g., mouse, rat, sheep, etc.) whose protein sequence has been modified such that it increases the similarities to antibody variants produce naturally in humans. In one embodiment of any of the aspects, the humanized antibody is a humanized monoclonal antibody. In one embodiment of any of the aspects, the humanized antibody is a humanized polyclonal antibody. In one embodiment of any of the aspects, the humanized antibody is for therapeutic use.

[0123] In one embodiment of any of the aspects, the anti-Ffar2 antibody is any known anti-Ffar2 antibodies in the art, or any anti-Ffar2 antibodies that are yet to be discovered. Exemplary anti-Ffar2 antibodies known in the art include, but are not limited to, anti-Ffar2 antibodies sold by Thermo Fisher Scientific (Waltham, Mass.). In one embodiment of any of the aspects, the anti-Ffar2 antibody is a humanized anti-Ffar2 antibody derived from any known, or yet to be discovered, non-human anti-Ffar2 antibody.

[0124] In another embodiment of any of the aspects, the antibody or antibody reagent binds to an amino acid sequence that corresponds to the amino acid sequence encoding Ffar2 (SEQ ID NO: 1).

[0125] In another embodiment of any of the aspects, the anti-Ffar2 antibody or antibody reagent binds to an amino acid sequence that comprises the sequence of SEQ ID NO: 1; or binds to an amino acid sequence that comprises a sequence with at least 80%, at least 85%, at least 90%, at least 95%, at least 96%, at least 97%, at least 98%, at least 99% or greater sequence identity to the sequence of SEQ ID NO: 1. In one embodiment of any of the aspects, the anti-Ffar2 antibody or antibody reagent binds to an amino acid sequence that comprises the entire sequence of SEQ ID NO: 1 In another embodiment, of any of the aspects, the antibody or antibody reagent binds to an amino acid sequence that comprises a fragment of the sequence of SEQ ID NO: 1, wherein the fragment is sufficient to bind its target, e.g., Ffar2 or a metabolite that is a ligand for Ffar2, and result in the activation of Ffar2 level and/or activity. The antibody can directly or indirectly affect Ffar2 levels, e.g. by binding to a transcriptional repressor protein of Ffar2 gene expression thereby increasing gene expression of Ffar2.

[0126] In one embodiment of any of the aspects, the agent that increases Ffar2 is an antisense oligonucleotide. As used herein, an “antisense oligonucleotide” refers to a synthesized nucleic acid sequence that is complementary to a DNA or mRNA sequence, such as that of a microRNA. Antisense oligonucleotides are typically designed to block expression of a DNA or RNA target by binding to the target and halting expression at the level of transcription, translation, or splicing. Antisense oligonucleotides as described herein are complementary nucleic acid sequences designed to hybridize under cellular conditions to a gene. Thus, oligonucleotides are chosen that are sufficiently complementary to the target, i.e., that hybridize sufficiently well and with sufficient specificity in the context of the cellular environment, to give the desired effect. For example, an antisense oligonucleotide that activates or increases levels of Ffar2 directly or indirectly may comprise at least 5, at least 10, at least 15, at least 20, at least 25, at least 30, or more bases complementary to a portion of the coding sequence of the human Ffar gene (e.g., SEQ ID NO: 2), respectively. Furthermore, the antisense oligonucleotide can target transcription factors that regulate the expression of Ffar2 such as RORγt, X-box binding protein-1 (XBP1), or any other transcription factors known in the art.

[0127] In one embodiment of any of the aspects, Ffar2 is increased in the cell's genome using any genome editing system including, but not limited to, zinc finger nucleases, TALENS, meganucleases, and CRISPR/Cas systems. In one embodiment of any of the aspects, the genomic editing system used to incorporate the nucleic acid encoding one or more guide RNAs into the cell's genome is not a CRISPR/Cas system; this can prevent undesirable cell death in cells that retain a small amount of Cas enzyme/protein. It is also contemplated herein that either the Cas enzyme or the sgRNAs are each expressed under the control of a different inducible promoter, thereby allowing temporal expression of each to prevent such interference. The gene editing system can directly or indirectly modulate levels of Ffar2 expression, e.g. by inhibiting transcriptional repressors of Ffar2 that result in an increase in Ffar2 transcription.

[0128] When a nucleic acid encoding one or more sgRNAs and a nucleic acid encoding an RNA-guided endonuclease each need to be administered in vivo, the use of an adenovirus associated vector (AAV) is specifically contemplated. Other vectors for simultaneously delivering nucleic acids to both components of the genome editing/fragmentation system (e.g., sgRNAs, RNA-guided endonuclease) include lentiviral vectors, such as Epstein Barr, Human immunodeficiency virus (HIV), and hepatitis B virus (HBV). Each of the components of the RNA-guided genome editing system (e.g., sgRNA and endonuclease) can be delivered in a separate vector as known in the art or as described herein.

[0129] In one embodiment of any of the aspects, the agent activates or increases Ffar2 activity by RNA insertion or increasing RNA transcripts. Activators of the expression of a given gene can be an activating nucleic acid or transcription factor for Ffar2. In some embodiments, of any of the aspects, the inhibitory nucleic acid is an inhibitory RNA (iRNA). The RNAi can be single stranded or double stranded. The RNAi can directly or indirectly modulate Ffar2 expression, e.g. inhibiting transcriptional repressors of Ffar2 and thereby increasing Ffar2.

[0130] The iRNA can be siRNA, shRNA, endogenous microRNA (miRNA), or artificial miRNA. In one embodiment of any of the aspects, an iRNA as described herein affects inhibition of the expression and/or activity of a target, e.g. a transcriptional repressor of Ffar2. In some embodiments of any of the aspects, the agent is siRNA that inhibits transcriptional repressors of Ffar2. In some embodiments of any of the aspects, the agent is shRNA that inhibits a transcriptional repressor of Ffar2, thereby increasing Ffar2 expression.

[0131] One skilled in the art would be able to design siRNA, shRNA, or miRNA to target Ffar2 directly or indirectly by inhibiting a transcriptional repressor of Ffar2, e.g., using publically available design tools. siRNA, shRNA, or miRNA is commonly made using companies such as Dharmacon (Layfayette, CO) or Sigma Aldrich (St. Louis, Mo.).

[0132] In some embodiments of any of the aspects, the iRNA can be a dsRNA. A dsRNA includes two RNA strands that are sufficiently complementary to hybridize to form a duplex structure under conditions in which the dsRNA will be used. One strand of a dsRNA (the antisense strand) includes a region of complementarity that is substantially complementary, and generally fully complementary, to a target sequence. The target sequence can be derived from the sequence of an mRNA formed during the expression of the target. The other strand (the sense strand) includes a region that is complementary to the antisense strand, such that the two strands hybridize and form a duplex structure when combined under suitable conditions

[0133] The RNA of an iRNA can be chemically modified to enhance stability or other beneficial characteristics. The nucleic acids as described herein may be synthesized and/or modified by methods well established in the art, such as those described in “Current protocols in nucleic acid chemistry,” Beaucage, S. L. et al. (Edrs.), John Wiley & Sons, Inc., New York, N.Y., USA, which is hereby incorporated herein by reference.

[0134] In another embodiment of any of the aspects, the agent is miRNA that activates or increases Ffar2 activity. MicroRNAs are small non-coding RNAs with an average length of 22 nucleotides. These molecules act by binding to complementary sequences within mRNA molecules, usually in the 3′ untranslated (3′UTR) region, thereby promoting target mRNA degradation or inhibited mRNA translation. The interaction between microRNA and mRNAs is mediated by what is known as the “seed sequence”, a 6-8-nucleotide region of the microRNA that directs sequence-specific binding to the mRNA through imperfect Watson-Crick base pairing. More than 900 microRNAs are known to be expressed in mammals. Many of these can be grouped into families on the basis of their seed sequence, thereby identifying a “cluster” of similar microRNAs. A miRNA can be expressed in a cell, e.g., as naked DNA. A miRNA can be encoded by a nucleic acid that is expressed in the cell, e.g., as naked DNA or can be encoded by a nucleic acid that is contained within a vector. The miRNA can directly or indirectly modulate Ffar2 expression. For example, the miRNA can inhibit transcriptional repressors of Ffar2.

[0135] The agent may be contained in and thus further include a vector. Many such vectors useful for transferring exogenous genes into target mammalian cells are available. The vectors may be episomal, e.g. plasmids, virus-derived vectors such cytomegalovirus, adenovirus, etc., or may be integrated into the target cell genome, through homologous recombination or random integration, e.g. retrovirus-derived vectors such as MMLV, HIV-1, ALV, etc. In some embodiments, combinations of retroviruses and an appropriate packaging cell line may also find use, where the capsid proteins will be functional for infecting the target cells. Usually, the cells and virus will be incubated for at least about 24 hours in the culture medium. The cells are then allowed to grow in the culture medium for short intervals in some applications, e.g. 24-73 hours, or for at least two weeks, and may be allowed to grow for five weeks or more, before analysis. Commonly used retroviral vectors are “defective”, i.e. unable to produce viral proteins required for productive infection. Replication of the vector requires growth in the packaging cell line.

[0136] The term “vector”, as used herein, refers to a nucleic acid construct designed for delivery to a host cell or for transfer between different host cells. As used herein, a vector can be viral or non-viral. The term “vector” encompasses any genetic element that is capable of replication when associated with the proper control elements and that can transfer gene sequences to cells. A vector can include, but is not limited to, a cloning vector, an expression vector, a plasmid, phage, transposon, cosmid, artificial chromosome, virus, virion, etc.

[0137] As used herein, the term “expression vector” refers to a vector that directs expression of an RNA or polypeptide (e.g., Ffar2 or a modulator of Ffar2) from nucleic acid sequences contained therein linked to transcriptional regulatory sequences on the vector. The sequences expressed will often, but not necessarily, be heterologous to the cell. An expression vector may comprise additional elements, for example, the expression vector may have two replication systems, thus allowing it to be maintained in two organisms, for example in human cells for expression and in a prokaryotic host for cloning and amplification. The term “expression” refers to the cellular processes involved in producing RNA and proteins and as appropriate, secreting proteins, including where applicable, but not limited to, for example, transcription, transcript processing, translation and protein folding, modification and processing. “Expression products” include RNA transcribed from a gene, and polypeptides obtained by translation of mRNA transcribed from a gene. The term “gene” means the nucleic acid sequence which is transcribed (DNA) to RNA in vitro or in vivo when operably linked to appropriate regulatory sequences. The gene may or may not include regions preceding and following the coding region, e.g. 5′ untranslated (5′UTR) or “leader” sequences and 3′ UTR or “trailer” sequences, as well as intervening sequences (introns) between individual coding segments (exons).

[0138] Integrating vectors have their delivered RNA/DNA permanently incorporated into the host cell chromosomes. Non-integrating vectors remain episomal which means the nucleic acid contained therein is never integrated into the host cell chromosomes. Examples of integrating vectors include retroviral vectors, lentiviral vectors, hybrid adenoviral vectors, and herpes simplex viral vector.

[0139] One example of a non-integrative vector is a non-integrative viral vector. Non-integrative viral vectors eliminate the risks posed by integrative retroviruses, as they do not incorporate their genome into the host DNA. One example is the Epstein Barr oriP/Nuclear Antigen-1 (“EBNA1”) vector, which is capable of limited self-replication and known to function in mammalian cells. As containing two elements from Epstein-Barr virus, oriP and EBNA1, binding of the EBNA1 protein to the virus replicon region oriP maintains a relatively long-term episomal presence of plasmids in mammalian cells. This particular feature of the oriP/EBNA1 vector makes it ideal for generation of integration-free host cells. Another non-integrative viral vector is adenoviral vector and the adeno-associated viral (AAV) vector.

[0140] Another non-integrative viral vector is RNA Sendai viral vector, which can produce protein without entering the nucleus of an infected cell. The F-deficient Sendai virus vector remains in the cytoplasm of infected cells for a few passages, but is diluted out quickly and completely lost after several passages (e.g., 10 passages).

[0141] Another example of a non-integrative vector is a minicircle vector. Minicircle vectors are circularized vectors in which the plasmid backbone has been released leaving only the eukaryotic promoter and cDNA(s) that are to be expressed.

[0142] As used herein, the term “viral vector” refers to a nucleic acid vector construct that includes at least one element of viral origin and has the capacity to be packaged into a viral vector particle. The viral vector can contain a nucleic acid encoding a polypeptide as described herein in place of non-essential viral genes. The vector and/or particle may be utilized for the purpose of transferring nucleic acids into cells either in vitro or in vivo. Numerous forms of viral vectors are known in the art.

[0143] In the various embodiments of any of the aspects, it is contemplated that variants (naturally occurring or otherwise), alleles, homologs, conservatively modified variants, and/or conservative substitution variants of any of the particular polypeptides described are encompassed. As to amino acid sequences (e.g. SEQ ID NO:1), one of ordinary skill will recognize that individual substitutions, deletions or additions to a nucleic acid, peptide, polypeptide, or protein sequence which alters a single amino acid or a small percentage of amino acids in the encoded sequence is a “conservatively modified variant” where the alteration results in the substitution of an amino acid with a chemically similar amino acid and retains the desired activity of the polypeptide. Such conservatively modified variants are in addition to and do not exclude polymorphic variants, interspecies homologs, and alleles consistent with the disclosure.

[0144] A given amino acid can be replaced by a residue having similar physiochemical characteristics, e.g., substituting one aliphatic residue for another (such as Ile, Val, Leu, or Ala for one another), or substitution of one polar residue for another (such as between Lys and Arg; Glu and Asp; or Gln and Asn). Other such conservative substitutions, e.g., substitutions of entire regions having similar hydrophobicity characteristics, are well known. Polypeptides comprising conservative amino acid substitutions can be tested in any one of the assays described herein to confirm that a desired activity, e.g. ligand-mediated receptor activity and specificity of a native or reference polypeptide is retained.

[0145] Amino acids can be grouped according to similarities in the properties of their side chains (in A. L. Lehninger, in Biochemistry, second ed., pp. 73-75, Worth Publishers, New York (1975)): (1) non-polar: Ala (A), Val (V), Leu (L), Ile (I), Pro (P), Phe (F), Trp (W), Met (M); (2) uncharged polar: Gly (G), Ser (S), Thr (T), Cys (C), Tyr (Y), Asn (N), Gln (Q); (3) acidic: Asp (D), Glu (E); (4) basic: Lys (K), Arg (R), His (H). Alternatively, naturally occurring residues can be divided into groups based on common side-chain properties: (1) hydrophobic: Norleucine, Met, Ala, Val, Leu, Ile; (2) neutral hydrophilic: Cys, Ser, Thr, Asn, Gln; (3) acidic: Asp, Glu; (4) basic: His, Lys, Arg; (5) residues that influence chain orientation: Gly, Pro; (6) aromatic: Trp, Tyr, Phe. Non-conservative substitutions will entail exchanging a member of one of these classes for another class. Particular conservative substitutions include, for example; Ala into Gly or into Ser; Arg into Lys; Asn into Gln or into His; Asp into Glu; Cys into Ser; Gln into Asn; Glu into Asp; Gly into Ala or into Pro; His into Asn or into Gln; Ile into Leu or into Val; Leu into Ile or into Val; Lys into Arg, into Gln or into Glu; Met into Leu, into Tyr or into Ile; Phe into Met, into Leu or into Tyr; Ser into Thr; Thr into Ser; Trp into Tyr; Tyr into Trp; and/or Phe into Val, into Ile or into Leu.

[0146] In some embodiments of any of the aspects, the agent is a peptide. In some embodiments of any of the aspects, the agent is a Ffar2 polypeptide. In some embodiments of any of the aspects, the agent is a vector that encodes a Ffar2 polypeptide.

[0147] In some embodiments of any of the aspects, a “peptide” or “polypeptide” as described herein (or a nucleic acid encoding such a polypeptide) can be a functional fragment of one of the amino acid sequences described herein. As used herein, a “functional fragment” is a fragment or segment of a peptide which retains at least 50% of the wild type reference polypeptide's activity according to an assay known in the art or described below herein. A functional fragment can comprise conservative substitutions of the sequences disclosed herein.

[0148] In some embodiments of any of the aspects, a polypeptide as described herein can be a variant of a polypeptide or molecule as described herein. In some embodiments, the variant is a conservatively modified variant. Conservative substitution variants can be obtained by mutations of native nucleotide sequences, for example. A “variant,” as referred to herein, is a polypeptide substantially homologous to a native or reference polypeptide, but which has an amino acid sequence different from that of the native or reference polypeptide because of one or a plurality of deletions, insertions or substitutions. Variant polypeptide-encoding DNA sequences encompass sequences that comprise one or more additions, deletions, or substitutions of nucleotides when compared to a native or reference DNA sequence, but that encode a variant protein or fragment thereof that retains activity of the non-variant polypeptide. A wide variety of PCR-based site-specific mutagenesis approaches are known in the art and can be applied by the ordinarily skilled artisan.

[0149] A variant amino acid or DNA sequence can be at least 80%, at least 90%, at least 91%, at least 92%, at least 93%, at least 94%, at least 95%, at least 96%, at least 97%, at least 98%, at least 99%, identical to a native or reference sequence (e.g. SEQ ID NO: 1). The degree of homology (percent identity) between a native and a mutant sequence can be determined, for example, by comparing the two sequences using freely available computer programs commonly employed for this purpose on the world wide web (e.g. BLASTp or BLASTn with default settings).

[0150] Alterations of the native amino acid sequence can be accomplished by any of a number of techniques known in the art. Mutations can be introduced, for example, at particular loci by synthesizing oligonucleotides containing a mutant sequence, flanked by restriction sites permitting ligation to fragments of the native sequence. Following ligation, the resulting reconstructed sequence encodes an analog having the desired amino acid insertion, substitution, or deletion. Alternatively, oligonucleotide-directed site-specific mutagenesis procedures can be employed to provide an altered nucleotide sequence having particular codons altered according to the substitution, deletion, or insertion required. Techniques for making such alterations are well established and include, for example, those disclosed by Walder et al. (Gene 42:133, 1986); Bauer et al. (Gene 37:73, 1985); Craik (BioTechniques, January 1985, 12-19); Smith et al. (Genetic Engineering: Principles and Methods, Plenum Press, 1981); and U.S. Pat. Nos. 4,518,584 and 4,737,462, which are herein incorporated by reference in their entireties. Any cysteine residue not involved in maintaining the proper conformation of a polypeptide also can be substituted, generally with serine, to improve the oxidative stability of the molecule and prevent aberrant crosslinking. Conversely, cysteine bond(s) can be added to a polypeptide to improve its stability or facilitate oligomerization.

### Pharmaceutical Compositions:

[0151] In one aspect, described herein is a pharmaceutical composition comprising the agent described herein. In another aspect, described herein is an agent that is formulated with a pharmaceutical composition or a pharmaceutically acceptable carrier.

[0152] In another aspect, described herein is a pharmaceutical composition formulated for the treatment of a gastrointestinal disease, the pharmaceutical composition comprises: an agent that increases the level or activity of Ffar2, wherein the pharmaceutical composition increases in the number of group 3 innate lymphoid cells (ILC3s) in a subject.

[0153] In another aspect, described herein is a pharmaceutical composition formulated for the treatment of a gastrointestinal disease, the pharmaceutical composition comprises: an agent that increases the level or activity of Ffar2, a pharmaceutically acceptable carrier or excipient, wherein the pharmaceutical composition increases in the number of group 3 innate lymphoid cells (ILC3s) in a subject.

[0154] In another aspect, described herein is a pharmaceutical composition for use in the treatment of a gastrointestinal disease.

[0155] In one embodiment of any of the aspects, the pharmaceutical composition is formulated to restrict delivery of the agent to the gastrointestinal tract of the subject. In some embodiments, the pharmaceutical composition comprises an enteric coating.

[0156] In another embodiment of any of the aspects, the composition is formulated for the treatment or prevention of a gastrointestinal disease. In another embodiment, of any of the aspects, the gastrointestinal disease is a gastrointestinal infection, inflammatory bowel disease (IBD), gastrointestinal injury, appendicitis, Crohn's disease (CD), ulcerative colitis (UC), gastritis, enteritis, esophagitis, gastroesophageal reflux disease (GERD), celiac disease, diverticulitis, food intolerance, ulcer, infectious colitis, irritable bowel syndrome, and cancer.

[0157] In one embodiment of any of the aspects, the composition further comprises a lipid vehicle. Exemplary lipid vehicles include, but are not limited to, liposomes, micelles, exosomes, lipid emulsions, and lipid-drug complex.

[0158] In another embodiment of any of the aspects, the pharmaceutical composition further comprises a particle or polymer-based vehicle. Exemplary particle or polymer-based vehicles include, but are not limited to, nanoparticles, microparticles, polymer microspheres, or polymer-drug conjugates.

[0159] As used herein, the term pharmaceutical composition” or “pharmaceutically acceptable carrier” are used interchangeably and can include any material or substance that, when combined with an active ingredient, allows the ingredient to retain biological activity and is non-reactive with the subject's immune system. Examples include, but are not limited to, any of the standard pharmaceutical carriers such as a phosphate buffered saline solution, emulsions such as oil/water emulsion, and various types of wetting agents. The term “pharmaceutically acceptable carriers” excludes tissue culture media. Non limiting examples of pharmaceutical carriers include particle or polymer-based vehicles such as nanoparticles, microparticles, polymer microspheres, or polymer-drug conjugates.

[0160] In some embodiments, the pharmaceutical composition is a liquid dosage form or solid dosage form. Liquid dosage forms for oral administration include, but are not limited to, pharmaceutically acceptable emulsions, microemulsions, solutions, suspensions, syrups and elixirs.

[0161] The liquid dosage forms can contain inert diluents commonly used in the art such as, for example, water or other solvents, solubilizing agents and emulsifiers such as ethyl alcohol, isopropyl alcohol, ethyl carbonate, ethyl acetate, benzyl alcohol, benzyl benzoate, propylene glycol, 1,3-butylene glycol, dimethylformamide, oils (in particular, cottonseed, groundnut, corn, germ, olive, castor, and sesame oils), glycerol, tetrahydrofurfuryl alcohol, polyethylene glycols and fatty acid esters of sorbitan, and mixtures thereof. Besides inert diluents, the oral compositions can also include adjuvants such as wetting agents, emulsifying and suspending agents, sweetening, flavoring, and perfuming agents.

[0162] Solid dosage forms for oral administration include capsules, tablets, pills, powders, and granules. In such solid dosage forms, the agent described herein is mixed with at least one inert, pharmaceutically acceptable excipient or carrier such as sodium citrate or dicalcium phosphate and/or a) fillers or extenders such as starches, lactose, sucrose, glucose, mannitol, and silicic acid, b) binders such as, for example, carboxymethylcellulose, alginates, gelatin, polyvinylpyrolidinone, sucrose, and acacia, c) humectants such as glycerol, d) disintegrating agents such as agar-agar, calcium carbonate, potato or tapioca starch, alginic acid, certain silicates, and sodium carbonate, e) solution retarding agents such as paraffin, f) absorption accelerators such as quaternary ammonium compounds, g) wetting agents such as, for example, cetyl alcohol and glycerol monostearate, h) absorbents such as kaolin and bentonite clay, and i) lubricants such as talc, calcium stearate, magnesium stearate, solid polyethylene glycols, sodium lauryl sulfate, and mixtures thereof. In the case of capsules, tablets and pills, the dosage form can also comprise buffering agents.

[0163] Solid compositions of a similar type can also be employed as fillers in soft and hard-filled gelatin capsules using such excipients as lactose or milk sugar as well as high molecular weight polyethylene glycols, and the like. The solid dosage forms of tablets, dragees, capsules, pills, can be used. Solid compositions of a similar type can also be employed as fillers in soft and hard-filled gelatin capsules using such excipients as lactose or milk sugar as well as high molecular weight polyethylene glycols, and the like. The solid dosage forms of tablets, dragees, capsules, pills, and granules can be prepared with coatings and shells such as enteric coatings and other coatings well known in the pharmaceutical formulating art. They can optionally contain opacifying agents and can also be of a composition that they release the active ingredient(s) only, or preferentially, in a certain part of the intestinal tract, optionally, in a delayed manner. Examples of embedding compositions that can be used include polymeric substances and waxes. Solid compositions of a similar type can also be employed as fillers in soft and hard-filled gelatin capsules using such excipients as lactose or milk sugar as well as high molecular weight polyethylene glycols, and the like.

[0164] The solid dosage forms of tablets, dragees, capsules, pills, and granules can be prepared with coatings and shells such as enteric coatings and other coatings well known in the pharmaceutical formulating art. They can optionally contain opacifying agents and can also be of a composition that they release the active ingredient(s) only, or preferentially, in a certain part of the intestinal tract, optionally, in a delayed manner. Examples of embedding compositions that can be used include polymeric substances and waxes. Solid compositions of a similar type can also be employed as fillers in soft and hard-filled gelatin capsules using such excipients as lactose or milk sugar as well as high molecular weight polyethylene glycols, and the like.

[0165] The agent described herein can be admixed with at least one inert diluent such as sucrose, lactose and starch. Such dosage forms can also comprise, as in normal practice, additional substances other than inert diluents, e.g., tableting lubricants and other tableting aids such as magnesium stearate and microcrystalline cellulose. In the case of capsules, tablets and pills, the dosage forms can also comprise buffering agents. They can optionally contain opacifying agents and can also be of a composition that they release the active ingredient(s) only, or preferentially, in a certain part of the intestinal tract, optionally, in a delayed manner. Examples of embedding compositions which can be used include polymeric substances and waxes.

[0166] As used herein, the term “restricts delivery of the composition to the gastrointestinal tract” refers to a formulation that permits or facilitates the delivery of the agent or pharmaceutical composition described herein to the colon, large intestine, or small intestine in viable form. Enteric coating or micro- or nano-particle formulations can facilitate such delivery as can, for example, buffer or other protective formulations.

[0167] In some embodiments, the carrier or excipient restricts delivery of the composition to the gastrointestinal tract. In some embodiments, the composition provided herein is restricted to the gastrointestinal tract by the addition of a sulfate group or a polar group to the compounds.

[0168] In some embodiments, the carrier or excipient is an enteric coating or enteric-coated drug delivery device. As used herein, the terms “enteric coating” or “enteric-coated drug delivery device” refers to any drug delivery method that can be administered orally but is not degraded or activated until the device enters the intestines. Such methods can utilize a coating or encapsulation that is degraded using e.g., pH dependent means, permitting protection of the delivery device and the agent to be administered or transplanted throughout the gastrointestinal tract until the device reaches the alkaline pH of the intestines (e.g. cecum or colon).

[0169] An enteric coating can control the location of where an agent is released in the digestive system. Thus, an enteric coating can be used such that a pharmaceutical composition does not dissolve and release the agent in the stomach, but rather travels to the intestine, where it dissolves and releases the agent in an environment that is most beneficial for increasing IL-22 secretion (e.g. from ILC3 cells). An enteric coating can be stable at low pH (such as in the stomach) and can dissolve at higher pH (for example, in the intestine). Material that can be used in enteric coatings includes, for example, alginic acid, cellulose acetate phthalate, plastics, waxes, shellac, and fatty acids (e.g., stearic acid, palmitic acid). Enteric coatings are described, for example, in U.S. Pat. Nos. 5,225,202, 5,733,575, 6,139,875, 6,420,473, 6,455,052, and 6,569,457, all of which are herein incorporated by reference in their entirety. The enteric coating can be an aqueous enteric coating. Examples of polymers that can be used in enteric coatings include, for example, shellac (trade name EmCoat 120 N, Marcoat 125); cellulose acetate phthalate (trade names AQUACOAT™, AQUACOAT ECD™, SEPIFILM™, KLUCEL™, and METOLOSE™); polyvinylacetate phthalate (trade name SURETERIC™); and methacrylic acid (trade names EUDRAGIT™, EUDRAGIT L 100-55™ from Evonik Industries, Germany).

[0170] Pharmaceutical compositions include formulations suitable for oral administration may be provided as discrete units, such as tablets, capsules, cachets, syrups, elixirs, prepared food items, microemulsions, solutions, suspensions, lozenges, or gel-coated ampules, each containing a predetermined amount of the active compound; as powders or granules; as solutions or suspensions in aqueous or non-aqueous liquids; or as oil-in-water or water-in-oil emulsions.

[0171] Accordingly, formulations suitable for rectal administration include gels, creams, lotions, aqueous or oily suspensions, dispersible powders or granules, emulsions, dissolvable solid materials, douches, and the like can be used. The formulations are preferably provided as unit-dose suppositories comprising the active ingredient in one or more solid carriers forming the suppository base, for example, cocoa butter. Suitable carriers for such formulations include petroleum jelly, lanolin, polyethyleneglycols, alcohols, and combinations thereof. Alternatively, colonic washes with the rapid recolonization deployment agent of the present disclosure can be formulated for colonic or rectal administration.

### Administration and Dosing:

[0172] The agents and pharmaceutical compositions described herein (e.g., that increases the level or activity of Ffar2) can be administered to a subject having or diagnosed as having a gastrointestinal disease. In some embodiments of any of the aspects, the methods described herein comprise administering an effective amount of an agent to a subject in order to alleviate at least one symptom of the gastrointestinal disease. As used herein, “alleviating at least one symptom of the gastrointestinal disease” is ameliorating any condition or symptom associated with the gastrointestinal disease (e.g., fatigue, pain, vomiting, nausea, upset stomach, diarrhea). As compared with an equivalent untreated control, such reduction is by at least 5%, 10%, 20%, 40%, 50%, 60%, 80%, 90%, 95%, 99% or more as measured by any standard technique. A variety of means for administering the agents and compositions described herein to subjects are known to those of skill in the art.

[0173] In one embodiment of any of the aspects, the agent is administered systemically or locally (e.g., to the gastrointestinal tract). In one embodiment of any of the aspects, the agent is administered intravenously. In one embodiment of any of the aspects, the agent is administered continuously, in intervals, or sporadically. The route of administration of the agent will be optimized for the type of agent being delivered (e.g., a small molecule), and can be determined by a skilled practitioner.

[0174] The term “effective amount” as used herein refers to the amount of an agent or composition described herein can be administered to a subject having or diagnosed as having a gastrointestinal disease needed to alleviate at least one or more symptom of the disease. The term “therapeutically effective amount” therefore refers to an amount of an agent or composition that is sufficient to provide a particular anti-gastrointestinal disease effect when administered to a typical subject. An effective amount as used herein, in various contexts, would also include an amount of an agent sufficient to delay the development of a symptom of the disease, alter the course of a symptom of the disease (e.g., slowing the progression of the gastrointestinal disease), or reverse a symptom of the disease (e.g., correcting or halting symptoms of the gastrointestinal disease). Thus, it is not generally practicable to specify an exact “effective amount”. However, for any given case, an appropriate “effective amount” can be determined by one of ordinary skill in the art using only routine experimentation.

[0175] In one embodiment of any of the aspects, the agent or composition is administered continuously (e.g., at constant levels over a period of time). Continuous administration of an agent can be achieved, e.g., by epidermal patches, continuous release formulations, or on-body injectors.

[0176] In one embodiment of any of the aspects, the agent or pharmaceutical composition is administered in intervals (e.g., at various levels over a given period of time). In some embodiments, the agent or pharmaceutical composition is administered hourly, daily, weekly, or monthly. By way of example only, the agent or pharmaceutical composition can be administered orally twice a day for a period of 1-2 weeks.

[0177] Effective amounts, toxicity, and therapeutic efficacy can be evaluated by standard pharmaceutical procedures in cell cultures or experimental animals. The dosage can vary depending upon the dosage form employed and the route of administration utilized. The dose ratio between toxic and therapeutic effects is the therapeutic index and can be expressed as the ratio LD50/ED50. Compositions and methods that exhibit large therapeutic indices are preferred. A therapeutically effective dose can be estimated initially from cell culture assays. Also, a dose can be formulated in animal models to achieve a circulating plasma concentration range that includes the IC50 or EC50 (i.e., the concentration of the agent, which achieves a half-maximal inhibition of symptoms) as determined in cell culture, or in an appropriate animal model. Levels in plasma can be measured, for example, by high performance liquid chromatography. The effects of any particular dosage can be monitored by a suitable bioassay, e.g., measuring gastrointestinal function, or blood work, among others. The dosage can be determined by a physician and adjusted, as necessary, to suit observed effects of the treatment.

[0178] “Unit dosage form” as the term is used herein refers to a dosage for suitable one administration. By way of example a unit dosage form can be an amount of therapeutic disposed in a delivery device, e.g., a syringe or intravenous drip bag. In one embodiment of any of the aspects, a unit dosage form is administered in a single administration. In another embodiment, more than one unit dosage form can be administered simultaneously.

[0179] The dosage of the agent as described herein can be determined by a physician and adjusted, as necessary, to suit observed effects of the treatment. With respect to duration and frequency of treatment, it is typical for skilled clinicians to monitor subjects in order to determine when the treatment is providing therapeutic benefit, and to determine whether to administer further agents, discontinue treatment, resume treatment, or make other alterations to the treatment regimen. The dosage should not be so large as to cause adverse side effects, such as cytokine release syndrome. Generally, the dosage will vary with the age, condition, and sex of the patient and can be determined by one of skill in the art. The dosage can also be adjusted by the individual physician in the event of any complication.

[0180] In one embodiment of any of the aspects, the agent or composition described herein is used as a monotherapy. In one embodiment of any of the aspects, the agents described herein can be used in combination with other known agents and therapies for a gastrointestinal disease. Administered “in combination,” as used herein, means that two (or more) different treatments are delivered to the subject during the course of the subject's affliction with the disorder, e.g., the two or more treatments are delivered after the subject has been diagnosed with the disorder (a gastrointestinal disease) and before the disorder has been cured or eliminated or treatment has ceased for other reasons. In some embodiments, the delivery of one treatment is still occurring when the delivery of the second begins, so that there is overlap in terms of administration. This is sometimes referred to herein as “simultaneous” or “concurrent delivery.” In other embodiments, the delivery of one treatment ends before the delivery of the other treatment begins. In some embodiments of either case, the treatment is more effective because of combined administration. For example, the second treatment is more effective, e.g., an equivalent effect is seen with less of the second treatment, or the second treatment reduces symptoms to a greater extent, than would be seen if the second treatment were administered in the absence of the first treatment, or the analogous situation is seen with the first treatment. In some embodiments, delivery is such that the reduction in a symptom, or other parameter related to the disorder is greater than what would be observed with one treatment delivered in the absence of the other. The effect of the two treatments can be partially additive, wholly additive, or greater than additive. The delivery can be such that an effect of the first treatment delivered is still detectable when the second is delivered. The agents described herein and the at least one additional therapy can be administered simultaneously, in the same or in separate compositions, or sequentially. For sequential administration, the agent described herein can be administered first, and the additional agent can be administered second, or the order of administration can be reversed. The agent and/or other therapeutic agents, procedures or modalities can be administered during periods of active disorder, or during a period of remission or less active disease. The agent can be administered before another treatment, concurrently with the treatment, post-treatment, or during remission of the disorder.

[0181] Therapeutics currently used to treat or prevent a gastrointestinal disease include, but are not limited to, antibiotics (e.g. aminosalicylic acid, norflaxacin, penicillin, cephalosporin), antivirals (e.g. zanamivir, oseltamivir), vaccines, corticosteroids (e.g. hydrocortisone, prednisone, prednisolone, budesonide), analgesics (e.g. acetaminophen, ibuprofen), non-steroidal anti-inflammatory drugs (e.g. mesalamine), anti-inflammatory drugs (e.g. sulfasalazine), immunosuppressants (e.g. infliximab, azathioprine, adalimumab, mercaptopurine), dietary supplements (e.g. iron), surgeries (e.g. colostomy, ileostomy, colectomy, proctocolectomy), IV fluids, enemas, other treatments for gastrointestinal disease are known in the art.

[0182] When administered in combination, the agent or composition and the additional agent (e.g., second or third agent), or all, can be administered in an amount or dose that is higher, lower or the same as the amount or dosage of each agent used individually, e.g., as a monotherapy. In certain embodiments, the administered amount or dosage of the agent, the additional agent (e.g., second or third agent), or all, is lower (e.g., at least 20%, at least 30%, at least 40%, or at least 50%) than the amount or dosage of each agent used individually. In other embodiments, the amount or dosage of agent, the additional agent (e.g., second or third agent), or all, that results in a desired effect (e.g., treatment of a gastrointestinal disease) is lower (e.g., at least 20%, at least 30%, at least 40%, or at least 50% lower) than the amount or dosage of each agent individually required to achieve the same therapeutic effect.

[0183] In some embodiments of any of the aspects, the agent is administered by direct injection, subcutaneous injection, muscular injection, oral, or nasal administration.

[0184] Parenteral dosage forms of an agents described herein can be administered to a subject by various routes, including, but not limited to, subcutaneous, intravenous (including bolus injection), intramuscular, and intraarterial. Since administration of parenteral dosage forms typically bypasses the patient's natural defenses against contaminants, parenteral dosage forms are preferably sterile or capable of being sterilized prior to administration to a patient. Examples of parenteral dosage forms include, but are not limited to, solutions ready for injection, dry products ready to be dissolved or suspended in a pharmaceutically acceptable vehicle for injection, suspensions ready for injection, controlled-release parenteral dosage forms, and emulsions.

[0185] Suitable vehicles that can be used to provide parenteral dosage forms of the disclosure are well known to those skilled in the art. Examples include, without limitation: sterile water; water for injection USP; saline solution; glucose solution; aqueous vehicles such as but not limited to, sodium chloride injection, Ringer's injection, dextrose Injection, dextrose and sodium chloride injection, and lactated Ringer's injection; water-miscible vehicles such as, but not limited to, ethyl alcohol, polyethylene glycol, and propylene glycol; and non-aqueous vehicles such as, but not limited to, corn oil, cottonseed oil, peanut oil, sesame oil, ethyl oleate, isopropyl myristate, and benzyl benzoate.

[0186] In some embodiments of any of the aspects, described herein is an agent or pharmaceutical composition that is administered to a subject by controlled- or delayed-release means. Ideally, the use of an optimally designed controlled-release preparation in medical treatment is characterized by a minimum of drug substance being employed to cure or control the condition in a minimum amount of time. Advantages of controlled-release formulations include: 1) extended activity of the drug; 2) reduced dosage frequency; 3) increased patient compliance; 4) usage of less total drug; 5) reduction in local or systemic side effects; 6) minimization of drug accumulation; 7) reduction in blood level fluctuations; 8) improvement in efficacy of treatment; 9) reduction of potentiation or loss of drug activity; and 10) improvement in speed of control of diseases or conditions. (Kim, Cherng-ju, Controlled Release Dosage Form Design, 2 (Technomic Publishing, Lancaster, Pa.: 2000)). Controlled-release formulations can be used to control a compound of formula (I)'s onset of action, duration of action, plasma levels within the therapeutic window, and peak blood levels. In particular, controlled- or extended-release dosage forms or formulations can be used to ensure that the maximum effectiveness of an agent is achieved while minimizing potential adverse effects and safety concerns, which can occur both from under-dosing a drug (i.e., going below the minimum therapeutic levels) as well as exceeding the toxicity level for the drug.

[0187] A variety of known controlled- or extended-release dosage forms, formulations, and devices can be adapted for use with any agent described herein. Examples include, but are not limited to, those described in U.S. Pat. Nos. 3,845,770; 3,916,899; 3,536,809; 3,598,123; 4,008,719; 5,674,533; 5,059,595; 5,591,767; 5,120,548; 5,073,543; 5,639,476; 5,354,556; 5,733,566; and 6,365,185, each of which is incorporated herein by reference in their entireties. These dosage forms can be used to provide slow or controlled-release of one or more active ingredients using, for example, hydroxypropylmethyl cellulose, other polymer matrices, gels, permeable membranes, osmotic systems (such as OROS® (Alza Corporation, Mountain View, Calif. USA)), multilayer coatings, microparticles, liposomes, or microspheres or a combination thereof to provide the desired release profile in varying proportions. Additionally, ion exchange materials can be used to prepare immobilized, adsorbed salt forms of the disclosed compounds and thus effect controlled delivery of the drug. Examples of specific anion exchangers include, but are not limited to, DUOLITE® A568 and DUOLITE® AP143 (Rohm&Haas, Spring House, Pa. USA).

### Efficacy:

[0188] The efficacy of an agents described herein, e.g., for the treatment of a gastrointestinal disease, can be determined by the skilled practitioner. However, a treatment is considered “effective treatment,” as the term is used herein, if one or more of the signs or symptoms of the gastrointestinal disease are altered in a beneficial manner, other clinically accepted symptoms are improved, or even ameliorated, or a desired response is induced e.g., by at least 10% following treatment according to the methods described herein. Efficacy can be assessed, for example, by measuring a marker, indicator, symptom, and/or the incidence of a condition treated according to the methods described herein or any other measurable parameter appropriate, e.g., fatigue, pain, weight loss, vomiting, or nausea. Efficacy can also be measured by a failure of an individual to worsen as assessed by hospitalization, or need for medical interventions (i.e., progression of the symptoms). Methods of measuring these indicators are known to those of skill in the art and/or are described herein. Efficacy can be assessed in animal models of a condition described herein, for example, a mouse model or an appropriate animal model of gastrointestinal disease (e.g. DSS-colonic injury model or T cell transfer colitis model), as the case may be. When using an experimental animal model, efficacy of treatment is evidenced when a statistically significant change in a marker is observed, e.g., reduced diarrhea, weight gain, etc.).

[0189] The dosage administered, as single or multiple doses, to an individual will vary depending upon a variety of factors, including pharmacokinetic properties of the inhibitor, the route of administration, conditions and characteristics (sex, age, body weight, health, size) of subjects, extent of symptoms, concurrent treatments, frequency of treatment and the effect desired. A therapeutically effective amount is also one in which any toxic or detrimental effects of the therapeutic agent are outweighed by the therapeutically beneficial effects. The effective amount in each individual case can be determined empirically by a skilled artisan according to established methods in the art and without undue experimentation. In general, the phrases “therapeutically-effective” and “effective for the treatment, prevention, or inhibition”, are intended to qualify agonist as disclosed herein which will achieve the goal of reduction in the severity of a gastrointestinal disease or at one related symptom thereof.

[0190] The data obtained from the cell culture assays and animal studies can be used in formulating a range of dosage for use in humans. The dosage of such compounds lies preferably within a range of circulating concentrations that include the ED₅₀ with little or no toxicity. The dosage may vary within this range depending upon the dosage form employed and the route of use or administration utilized.

[0191] The effective dose can be estimated initially from cell culture assays. A dose can be formulated in animals. Generally, the compositions are administered so that a compound of the disclosure herein is used or given at a dose from 1 μg/kg to 1000 mg/kg; 1 μg/kg to 500 mg/kg; 1 μg/kg to 150 mg/kg, 1 μg/kg to 100 mg/kg, 1 μg/kg to 50 mg/kg, 1 μg/kg to 20 mg/kg, 1 μg/kg to 10 mg/kg, 1 μg/kg to 1 mg/kg, 100 μg/kg to 100 mg/kg, 100 μg/kg to 50 mg/kg, 100 μg/kg to 20 mg/kg, 100 μg/kg to 10 mg/kg, 100 μg/kg to 1 mg/kg, 1 mg/kg to 100 mg/kg, 1 mg/kg to 50 mg/kg, 1 mg/kg to 20 mg/kg, 1 mg/kg to 10 mg/kg, 10 mg/kg to 100 mg/kg, 10 mg/kg to 50 mg/kg, or 10 mg/kg to 20 mg/kg. It is to be understood that ranges given here include all intermediate ranges, for example, the range 1 mg/kg to 10 mg/kg includes 1 mg/kg to 2 mg/kg, 1 mg/kg to 3 mg/kg, 1 mg/kg to 4 mg/kg, 1 mg/kg to 5 mg/kg, 1 mg/kg to 6 mg/kg, 1 mg/kg to 7 mg/kg, 1 mg/kg to 8 mg/kg, 1 mg/kg to 9 mg/kg, 2 mg/kg to 10 mg/kg, 3 mg/kg to 10 mg/kg, 4 mg/kg to 10 mg/kg, 5 mg/kg to 10 mg/kg, 6 mg/kg to 10 mg/kg, 7 mg/kg to 10 mg/kg, 8 mg/kg to 10 mg/kg, 9 mg/kg to 10 mg/kg, and the like. Further contemplated is a dose (either as a bolus or continuous infusion) of about 0.1 mg/kg to about 10 mg/kg, about 0.3 mg/kg to about 5 mg/kg, or 0.5 mg/kg to about 3 mg/kg. It is to be further understood that the ranges intermediate to those given above are also within the scope of this disclosure, for example, in the range 1 mg/kg to 10 mg/kg, for example use or dose ranges such as 2 mg/kg to 8 mg/kg, 3 mg/kg to 7 mg/kg, 4 mg/kg to 6 mg/kg, and the like.

[0192] The agent described herein can be administered at once, or can be divided into a number of smaller doses to be administered at intervals of time. It is understood that the precise dosage and duration of treatment will be a function of the location of where the composition is parenterally administered, the carrier and other variables that can be determined empirically using known testing protocols or by extrapolation from in vivo or in vitro test data. It is to be noted that concentrations and dosage values can also vary with the age of the individual treated. It is to be further understood that for any particular subject, specific dosage regimens can need to be adjusted over time according to the individual need and the professional judgment of the person administering or supervising the administration of the formulations. Hence, the concentration ranges set forth herein are intended to be exemplary and are not intended to limit the scope or practice of the claimed formulations.

### Assays, Treatments, and Diagnostics for a Gastrointestinal Disease:

[0193] In one aspect of any of the embodiments, described herein is a method of treating a gastrointestinal disease in a subject, the method comprises: (a) measuring the level of Ffar2 in a biological sample of a subject; and (b) comparing the measurement of (a) to a reference level; (c) identifying a subject with decreased Ffar2 in (a) as compared to a reference level as having a gastrointestinal disease; and (d) administering to the subject having a gastrointestinal disease an agent that modulates Ffar2.

[0194] In another aspect, described herein is a method of treating a gastrointestinal disease in a subject, the method comprises: (a) receiving the results of an assay that indicates that the level of Ffar2 in a biological sample of a subject is decreased compared to a reference level; and (b) administering to the subject an agent that modulates Ffar2.

[0195] In one embodiment of any of the aspects, the gastrointestinal disease is selected from the group consisting of: a gastrointestinal infection, inflammatory bowel disease (IBD), gastrointestinal injury, appendicitis, Crohn's disease (CD), ulcerative colitis (UC), gastritis, enteritis, esophagitis, gastroesophageal reflux disease (GERD), celiac disease, diverticulitis, food intolerance, ulcer, infectious colitis, irritable bowel syndrome, and cancer.

[0196] In another embodiment of any of the aspects, the method further comprises, prior to step (a), obtaining a biological sample from the subject. The biological sample can be obtained by methods known in the art such as blood draw or surgical methods. In another embodiment, of any of the aspects, the biological sample is a blood sample, buffy coat, serum, or tissue.

[0197] In another embodiment, of any of the aspects, the tissue is removed from the esophagus, small intestine, large intestine, or colon. In another embodiment, of any of the aspects, the tissue is a colonic solitary lymphoid tissue. Surgical removal of intestinal tissues is standard in the medical profession and methods are known in the art. For example, a colectomy, is a procedure in which part of the colon or a tissue sample from the colon is removed. Accordingly, if a gastrointestinal injury occurs, due to a car accident, military wounds, dextran sulfate sodium (DSS) injury, etc., tissue from the gastrointestinal tract can be repaired and a small biopsy can be removed for testing.

[0198] In another aspect, described herein is an assay for identifying an agent that modulates a functional property of an immune lymphoid cell, the assay comprises (a) contacting a population of innate lymphoid cells with an agent; and (b) detecting the level of Ffar2 wherein detecting a change in Ffar2 levels after contacting step (a) identifies the agent as one that can modulate a functional property of innate lymphoid cells.

[0199] In one embodiment of any of the aspects, the detecting step further comprises detecting the level of IL-22. In another embodiment, of any of the aspects, the detecting step further comprises detecting the level of RORγt. In another embodiment, of any of the aspects, the detecting step further comprises detecting the level of phosphorylated-Akt, XBP1, phosphorylated STAT3, phosphorylated ERK, mucin 2, mucin 3, mucin 4, mucin 5a, mucin 5b, Regenerating islet-derived protein (Reg) 3 alpha, Reg 3 beta, Reg 3 gamma, AhR, CCR6, Ki-67, GATA3, NKp46, pAKT, pp38, pERK, pSTAT3, IL-17, and/or Foxp3.

[0200] In another embodiment of any of the aspects, the detecting is accomplished by RT-PCR, flow cytometry, immunohistochemistry, Western Blot, enzyme-linked immunosorbent assay (ELISA), mass spectrometry, or microscopy. These methods are well known in the art.

[0201] For the assay, cells can be optionally allowed to grow for a period time before contacting with the agent. In some embodiments, a practitioner can obtain cells (e.g. ILC3s) that are already plated in the appropriate vessel and allowed to grow for a period of time. In other embodiments, the practitioner plates the cell in the appropriate vessel and allow the cells to grow for a period time, e.g., at least one day, at least two days, at least three days, at least four days, at least five days, at least six days, at least seven days or more before contacting with the test compound.

[0202] After the agent or test compound has been in contact with the cell or population of cells (e.g. ILC3s) for a sufficient period of time, amount of reporter (e.g., expression or activity) is measured and compared to a control or reference. For example, contact time can be from seconds to days or weeks. The practitioner can optimize the contact time for obtaining an optimal signal-to-noise ratio, time constraints, amount of test compound to be tested, number of cells, test volume, availability of reagents for the assay, and the like.

[0203] As used herein, the term “test compound” refers to compounds, agents as described herein, and/or pharmaceutical compositions that are to be screened for their ability to stimulate and/or increase and/or promote Ffar2 activity or expansion of ILC3 populations. The test compounds can include a wide variety of different compounds, including chemical compounds and mixtures of chemical compounds, e.g., small organic or inorganic molecules; saccharines; oligosaccharides; polysaccharides; biological macromolecules, e.g., peptides, proteins, and peptide analogs and derivatives; peptidomimetics; nucleic acids; nucleic acid analogs and derivatives; an extract made from biological materials such as bacteria, plants, fungi, or animal cells; animal tissues; naturally occurring or synthetic compositions; and any combinations thereof. In some embodiments of any of the aspects, the agent or test compound is a small molecule. In some embodiments of any of the aspects, the agent or test compound is a SCFA.

[0204] The number of possible test compounds runs into millions. Methods for developing small molecule, polymeric and genome based libraries are described, for example, in Ding, et al. J Am. Chem. Soc. 124: 1594-1596 (2002) and Lynn, et al., J. Am. Chem. Soc. 123: 8155-8156 (2001). Commercially available compound libraries can be obtained from, e.g., ArQule, Pharmacopia, Graffinity, Panvera, Vitas-M Lab, Biomol International and Oxford. These libraries can be screened using the screening devices and methods described herein. Chemical compound libraries such as those from NIH Roadmap, Molecular Libraries Screening Centers Network (MLSCN) can also be used. A comprehensive list of compound libraries can be found on the world-wide web at http://<broad.harvard.edu/chembio/platform/screening/compound_libraries/index.htm>. A chemical library or compound library is a collection of stored chemicals usually used ultimately in high-throughput screening or industrial manufacture. The chemical library can consist in simple terms of a series of stored chemicals. Each chemical has associated information stored in some kind of database with information such as the chemical structure, purity, quantity, and physiochemical characteristics of the compound.

[0205] Depending upon the particular embodiment being practiced, the test compounds can be provided free in solution, or may be attached to a carrier, or a solid support, e.g., beads. A number of suitable solid supports may be employed for immobilization of the test compounds. Examples of suitable solid supports include agarose, cellulose, dextran (commercially available as, i.e., Sephadex™, Sepharose™) carboxymethyl cellulose, polystyrene, polyethylene glycol (PEG), filter paper, nitrocellulose, ion exchange resins, plastic films, polyaminemethylvinylether maleic acid copolymer, glass beads, amino acid copolymer, ethylene-maleic acid copolymer, nylon, silk, etc. Additionally, for the methods described herein, test compounds can be screened individually, or in groups. Group screening is particularly useful where hit rates for effective test compounds are expected to be low such that one would not expect more than one positive result for a given group.

[0206] The test compound can be tested at any desired concentration. For example, the test compound can be tested at a final concentration of from 0.01 nanomolar to about 10 millimolar. Further, the test can be tested at 2 or more (e.g., 2, 3, 4, 5, 6, 7, 8, 9, 10 or more) different concentrations. This can be helpful if the test compound is active only in a range of concentration. When the test compound is tested at 2 or more different concentrations, the concentration difference can range from 10-10,000 fold (e.g., 10-5000 fold, 10-1000 fold, 10-500 fold, or 10-250 fold).

[0207] In some embodiments of any of the aspects, the agent or test compound is assayed more than once and selected if it reproducibly modulates Ffar2 expression or activity.

[0208] In some embodiments of any of the aspects, the assay further comprises the step of determining of the compound has scored on any other screens. This can be accomplished by looking at the various chemical databases that describe activity of compounds in various assays. This can help in identifying compounds that are unique to the present assay.

[0209] In some embodiments of any of the aspects, the selected test compound exhibits dose-dependent modulation of Ffar2 expression or activity. In some embodiments of any of the aspects, selected test compound exhibits maximal modulation of Ffar2 expression or activity in the assay. This can be helpful because some highly potent modulators (based on EC50) can yield only weak maximal activation, whereas other less potent modulators (based on EC50) can produce significantly greater activation, even at doses below their EC50.

[0210] The assay can be performed any suitable container or apparatus available to one of skill in the art for cell culturing. For example, the assay can be performed in 24-, 96-, or 384-well plates. In one embodiment of any of the aspects, the assay is performed in a 384-well plate.

[0211] Cells for the aspects disclosed herein can be obtained from any source available to one of skill in the art. Additionally, cells can be of any origin. Accordingly, in some embodiments, the cell is from a mammalian source. In some embodiments, of any of the aspects, the cells are innate lymphoid cells, or group 3 innate lymphoid cells (ILC3s). In another embodiment, of any of the aspects, the innate lymphoid cells are CCR6 positive or CCR6 negative cells.

[0212] In some embodiments of any of the aspects, the cell is from a subject, e.g., a patient. In some embodiments of any of the aspects, the cell is from the esophagus, small intestine, large intestine, or colon of the subject. In some embodiments of any of the aspects, the subject, is a patient in need of treatment for a gastrointestinal disease.

[0213] Some embodiments of the various aspects described herein can be described as in the following numbered paragraphs:
[0214] 1) A method for treating or preventing a gastrointestinal disease, the method comprising: administering to a subject in need thereof an agent that increases the level or activity of Free Fatty Acid Receptor 2 (Ffar2) in the subject.
[0215] 2) The method of paragraph 1, wherein the agent preferentially binds to a Ffar2 receptor.
[0216] 3) The method of any one of paragraphs 1-2, wherein the agent induces an increase in the number of group 3 innate lymphoid cells (ILC3s).
[0217] 4) The method of any one of paragraphs 1-3, wherein the agent induces secretion of interleukin-22 (IL-22) and/or interleukin-17 (IL-17) from ILC3s.
[0218] 5) The method of any one of paragraphs 1-4, wherein the agent is selected from the group consisting of a small molecule, an antibody, a peptide, a genome editing system, a vector, and a nucleic acid.
[0219] 6) The method of paragraph 5, wherein the small molecule is a short chain fatty acid (SCFA) pharmaceutically acceptable salt, or derivative thereof
[0220] 7) The method of paragraph 6, wherein the SCFA is selected from the group consisting of: propionic acid, acetic acid, butyric acid, formic acid, isobutyric acid, valeric acid, isovaleric acid, formate, acetate, propionate, butyrate, pentanoate, isobutyrate, valerate, isovalerate, sodium propionate, and pharmaceutically acceptable salts thereof.
[0221] 8) The method of paragraph 5, wherein the small molecule is selected from the group consisting of: ES43012-SOD, trans-2-methylcrotonic acid, propiolic acid, angelic acid, compound 34, sodium acetate, sodium propionate, sodium butyrate, formate, pentanoate, (S)-2-(4-chlorophenyl)-3,3-dimethyl-N-(5-phenylthiazol-2-yl)butanamide, BTI-A-404, BTI-A-292, AZ1729, and any derivative thereof
[0222] 9) The method of paragraph 5, wherein the vector or nucleic acid that encodes an Ffar2 polypeptide.
[0223] 10) The method of paragraph 9, wherein the vector is non-integrative or integrative.
[0224] 11) The method of paragraph 10, wherein the non-integrative vector is selected from the group consisting of an episomal vector, an EBNA1 vector, a minicircle vector, a non-integrative adenovirus, a non-integrative RNA, and a Sendai virus.
[0225] 12) The method of any one of paragraphs 5, 9, or 10, wherein the vector is an episomal vector.
[0226] 13) The method of any one of paragraphs 5, 9, or 10, wherein the vector is a lentiviral vector.
[0227] 14) The method of any one of paragraphs 1-13, wherein the agent is formulated with a pharmaceutical composition.
[0228] 15) The method of paragraph 14, wherein the pharmaceutical composition is formulated to restrict delivery of the agent to the gastrointestinal tract of the subject.
[0229] 16) The method of any one of paragraphs 14-15, wherein the pharmaceutical composition comprises an enteric coating.
[0230] 17) The method of any one of paragraphs 1-16, wherein the gastrointestinal disease is selected from the group consisting of: a gastrointestinal infection, inflammatory bowel disease (IBD), gastrointestinal injury, appendicitis, Crohn's disease (CD), ulcerative colitis (UC), gastritis, enteritis, esophagitis, gastroesophageal reflux disease (GERD), celiac disease, diverticulitis, food intolerance, ulcer, infectious colitis, irritable bowel syndrome, and cancer.
[0231] 18) The method of any one of paragraphs 1-17, wherein the administering reduces inflammation of the gastrointestinal tract.
[0232] 19) The method of any one of paragraphs 1-18, wherein the agent is administered by direct injection, subcutaneous injection, muscular injection, oral, or nasal administration.
[0233] 20) The method any one of paragraphs 1-19, wherein the subject is a mammal.
[0234] 21) The method any one of paragraphs 1-20, wherein the subject is a human.
[0235] 22) The method any one of paragraphs 1-21, wherein the level or activity of Ffar2 is increased by at least 50%, at least 60%, at least 70%, at least 80%, at least 90%, or more as compared to an appropriate control.
[0236] 23) The method of any one of paragraphs 1-22, wherein the secretion of IL-22 and/or IL-17 from ILC3s is increased by at least 50%, at least 60%, at least 70%, at least 80%, at least 90%, or more as compared to an appropriate control.
[0237] 24) A method of reducing inflammation in the gastrointestinal tract of a subject, the method comprising: administering to a subject an agent that increases the level or activity of Free Fatty Acid Receptor 2 (Ffar2) in the subject.
[0238] 25) The method of paragraph 24, wherein the agent preferentially binds to a Ffar2 receptor.
[0239] 26) The method of any one of paragraphs 24-25, wherein the agent induces an increase in the number of group 3 innate lymphoid cells (ILC3s).
[0240] 27) The method of any one of paragraphs 24-26, wherein the agent induces secretion of interleukin-22 (IL-22) and/or interleukin-17 (IL-17) from ILC3s.
[0241] 28) The method of any one of paragraphs 24-27, wherein the agent is selected from the group consisting of a small molecule, an antibody, a peptide, a genome editing system, a vector, and a nucleic acid.
[0242] 29) The method of paragraph 28, wherein the small molecule is a short chain fatty acid (SCFA) pharmaceutically acceptable salt, or derivative thereof
[0243] 30) The method of paragraph 29, wherein the SCFA is selected from the group consisting of: propionic acid, acetic acid, butyric acid, formic acid, isobutyric acid, valeric acid, isovaleric acid, formate, acetate, propionate, butyrate, pentanoate, isobutyrate, valerate, isovalerate, sodium propionate, and pharmaceutically acceptable salts thereof.
[0244] 31) The method of paragraph 28, wherein the small molecule is selected from the group consisting of: ES43012-SOD, trans-2-methylcrotonic acid, propiolic acid, angelic acid, compound 34, sodium acetate, sodium propionate, sodium butyrate, formate, pentanoate, (S)-2-(4-chlorophenyl)-3,3-dimethyl-N-(5-phenylthiazol-2-yl)butanamide, BTI-A-404, BTI-A-292, AZ1729, and any derivative thereof
[0245] 32) The method of paragraph 28, wherein the vector or nucleic acid that encodes an Ffar2 polypeptide.
[0246] 33) The method of any one of paragraphs 24-31, wherein the agent is formulated with a pharmaceutical composition.
[0247] 34) The method of paragraph 33, wherein the pharmaceutical composition is formulated to restrict delivery of the agent to the gastrointestinal tract of the subject.
[0248] 35) The method of any one of paragraphs 33-34, wherein the pharmaceutical composition comprises an enteric coating.
[0249] 36) An assay for identifying an agent that modulates a functional property of an immune lymphoid cell, the assay comprising:
   [0250] a. contacting a population of innate lymphoid cells with an agent; and
   [0251] b. detecting the level of Ffar2
[0252] wherein detecting a change in Ffar2 levels after contacting step (a) identifies the agent as one that can modulate a functional property of innate lymphoid cells.
[0253] 37) The assay of paragraph 36, wherein detecting step (b) further comprises detecting the level of IL-22.
[0254] 38) The assay of any one of paragraphs 36-37, wherein detecting step (b) further comprises detecting the level of RORγt, X-box binding protein-1 (XBP1), phosphorylated-Akt, phosphorylated STAT3, phosphorylated ERK, mucin 2, mucin 3, mucin 4, mucin 5a, mucin 5b, Regenerating islet-derived protein (Reg) 3 alpha, Reg 3 beta, Reg 3 gamma, and/or Ki-67.
[0255] 39) The assay of any one of paragraphs 36-38, wherein the innate lymphoid cells are group 3 innate lymphoid cells (ILC3).
[0256] 40) A method of treating a gastrointestinal disease in a subject, the method comprising:
   [0257] a. measuring the level of Ffar2 in a biological sample of a subject; and
   [0258] b. comparing the measurement of (a) to a reference level;
   [0259] c. identifying a subject with decreased Ffar2 in (a) as compared to a reference level as having a gastrointestinal disease; and
   [0260] d. administering to the subject having a gastrointestinal disease an agent that modulates Ffar2.
[0261] 41) The method of paragraph 40, wherein the gastrointestinal disease is selected from the group consisting of: a gastrointestinal infection, inflammatory bowel disease (IBD), gastrointestinal injury, appendicitis, Crohn's disease (CD), ulcerative colitis (UC), gastritis, enteritis, esophagitis, gastroesophageal reflux disease (GERD), celiac disease, diverticulitis, food intolerance, ulcer, infectious colitis, irritable bowel syndrome, and cancer.
[0262] 42) The method of any one of paragraphs 40-41, further comprising, prior to (a), obtaining a biological sample from the subject.
[0263] 43) The method of any one of paragraphs 40-42, wherein the biological sample is a blood sample, buffy coat, serum, or tissue.
[0264] 44) The method of any one of paragraphs 40-43, wherein the tissue is removed from the esophagus, small intestine, large intestine, or colon.
[0265] 45) A pharmaceutical composition formulated for the treatment of a gastrointestinal disease, the pharmaceutical composition comprising:
   [0266] an agent that increases the level or activity of Ffar2,
   [0267] wherein the pharmaceutical composition increases in the number of group 3 innate lymphoid cells (ILC3s) in a subject.
[0268] 46) The pharmaceutical composition of paragraph 45, wherein the agent is selected from the group consisting of a small molecule, an antibody, a peptide, a genome editing system, a vector, and a nucleic acid.
[0269] 47) The pharmaceutical composition of paragraph 46, wherein the small molecule is a short chain fatty acid (SCFA) pharmaceutically acceptable salt, or derivative thereof
[0270] 48) The pharmaceutical composition of paragraph 47, wherein the SCFA is selected from the group consisting of: propionic acid, acetic acid, butyric acid, formic acid, isobutyric acid, valeric acid, isovaleric acid, formate, acetate, propionate, butyrate, pentanoate, isobutyrate, valerate, isovalerate, sodium propionate, and pharmaceutically acceptable salts thereof
[0271] 49) The pharmaceutical composition of paragraph 46, wherein the small molecule is selected from the group consisting of: ES43012-SOD, trans-2-methylcrotonic acid, propiolic acid, angelic acid, compound 34, sodium acetate, sodium propionate, sodium butyrate, formate, pentanoate, (S)-2-(4-chlorophenyl)-3,3-dimethyl-N-(5-phenylthiazol-2-yl)butanamide, BTI-A-404, BTI-A-292, AZ1729, and any derivative thereof
[0272] 50) The pharmaceutical composition of paragraph 46, wherein the vector or nucleic acid encodes an Ffar2 polypeptide.
[0273] 51) The pharmaceutical composition of any one of paragraphs 45-50, wherein the pharmaceutical composition is formulated to restrict delivery of the agent to the gastrointestinal tract of the subject.
[0274] 52) The pharmaceutical composition of any one of paragraphs 45-51, wherein the pharmaceutical composition comprises an enteric coating.

### EXAMPLES

### Example 1: Metabolite-Sensing Receptor Ffar2 Regulates Colonic Group 3 Innate Lymphoid Cells and Gut Immunity

### Summary

[0275] Group 3 innate lymphoid cells (ILC3s) sense environmental signals that and play a role in gut homeostasis and host defense. However, metabolite-sensing G-protein-coupled receptors that regulate colonic ILC3s remain poorly understood. Results show that colonic ILC3s expressed Ffar2, a microbial metabolite-sensing receptor, and that Ffar2 agonism promoted ILC3 expansion. Deletion of Ffar2 in ILC3s decreased in situ proliferation and ILC3-derived IL-22 production. Ffar2 agonism of CCR6+ ILC3s enhanced their proliferation and IL-22 production and influenced ILC3 expansion in colonic lymphoid tissues. Ffar2 agonism activated AKT signaling and increased ILC3-derived IL22 via an AKT and STAT3 axis. Ffar2 deletion in ILC3s led to impaired gut epithelial function: altering mucus-associated proteins and antimicrobial peptides and increased susceptibility to colonic injury and inflammation. These findings demonstrate that Ffar2 regulates colonic ILC3 proliferation and function in a cell-intrinsic manner and identifies an ILC3-receptor signaling pathway regulating gut inflammatory tone and pathogen defense.

### Introduction

[0276] The innate lymphoid cell (ILC) family plays significant roles in immunity, inflammation, and tissue homeostasis and repair. ILCs are classified into three groups on the basis of signature transcription factors and distinct effector cytokines: Group 1 ILCs (ILC1s) require T-bet and produce interferon-γ (IFN-γ), Group 2 ILCs (ILC2s) express GATA3 and produce the type 2 cytokines interleukin 5 (IL-5) and IL-13, and Group 3 ILCs (ILC3s) are a heterogeneous population expressing transcription factor RAR-related orphan receptor gamma t (RORγt) and have the ability to produce IL-22 and/or IL-17^{1, 2, 3}.

[0277] ILC3s are enriched in the intestine, where they maintain gut homeostasis by orchestrating: lymphoid organ development, containment of commensal bacterial, tissue repair, host defense and regulation of adaptive immunity^{2, 4, 5, 6, 7} ILC3s can be divided into two subsets based on C-C chemokine receptor type 6 (CCR6) expression^{8, 9, 10, 11}. Both CCR6⁺ ILC3s and CCR6⁻ ILC3s produce IL-22, a key cytokine that is essential for recovery from tissue damage and protection against intracellular bacteria such as Citrobacter rodentium^{12, 13, 14}. CCR6⁺ ILC3s comprise lymphoid-tissue-inducer cells (LTi) and LTi-like cells. In addition to secreting IL-22, CCR6⁺ ILC3s can produce IL-17, a cytokine necessary for resistance against extracellular bacteria and fungi¹⁵. CCR6⁻ ILC3s can express NKp46 and NKp46⁺ ILC3s express T-bet and can secrete IFN-γ. CCR6⁻ NKp46⁻ ILC3s have the capacity to differentiate into NKp46⁺ ILC3s⁹. CCR6⁺ ILC3s are mainly clustered in aggregates together with stromal cells, dendritic cells (DCs) and B cells in cryptopatches, immature or mature isolated lymphoid follicles in the small intestine¹⁶. In contrast, CCR6⁻ ILC3s are scattered throughout the intestine. The steady-state adult colon has colonic patches and colonic solitary lymphoid tissues (SILTs), which are similar to small intestine lymphoid tissues^{17, 18}. Colonic patches are composed of B and T cells, segregated into clearly distinct compartments, and CCR6⁺LTi cells persist at the border of these compartments; Colonic SILTs appear in different developmental/maturation stages and contain CCR6⁻LTi cells, which are surrounded by B cell, DCs and a few T cells¹⁷.

[0278] Unlike myeloid cell population, ILC3s do not appear to express toll-like receptors or other canonical microbial-associated molecular pattern receptors. Rather, ILC3s process signals from other cells and soluble mediators within their local tissue microenvironment¹⁹. Recent studies suggest that environmental cues, such as microbial, dietary, and neuronal signals, regulate ILC3s through cell-intrinsic receptors. Bacterial metabolites and dietary components engage the aryl hydrocarbon receptor (AHR) and promote ILC3 proliferation and cytokine secretion^{20, 21, 22}. Retinoic acid (RA) and RA receptors (RARs) enhance IL-22 by ILC3s²³. Glial-derived neurotropic factor family ligand (GFL) also controls ILC3 via neuroregulatory receptor (RET) signaling²⁴.

[0279] Of the hundreds of bacterial metabolites in the gut^{25, 26}, short-chain fatty acids (SCFAs) have emerged as substantial regulators of immune responses in the gut and systemically^{27, 28, 29, 30.} SCFAs, which are produced in the colon through bacterial fermentation of dietary fiber can engage ‘metabolite-sensing’ G-protein-coupled receptors (GPCRs)^{26, 31, 32, 33}. Ffar2, a SCFA-sensing GPCR, is broadly immunomodulatory and plays a useful role in gut homeostasis and regulation of inflammation^{26, 32, 33}. Loss of Ffar2 in mice attenuates inflammation in colitis and arthritis mouse models via regulation of leukocyte chemotaxis³⁴. Ffar2 also mediates colonic Treg cell expansion and protects against T-cell transfer colitis³⁵. Ffar2 may even protect against type 1 diabetes via modulating Treg cell frequency³⁶. However, whether Ffar2 signaling regulates colonic ILC3s remains unknown.

[0280] Provided herein are results that show that colonic ILC3s express Ffar2 transcripts and Ffar2 agonism selectively promotes colonic ILC3 population frequency and number suggesting that colonic ILC3s express functional Ffar2. Ablation of Ffar2 in ILC3s decreased colonic ILC3 in situ proliferation and ILC3-derived IL-22 production. Ffar2-expressing CCR6⁺ ILC3s enhanced in situ proliferation and IL-22 production, and influenced an accumulation of ILC3s in colonic lymphoid tissues. In addition, Ffar2 signaling specifically activated AKT downstream of Ffar2 and directly regulated colonic ILC3-derived IL-22 via AKT and STAT3. Furthermore, Ffar2-deficient ILC3s led to impaired gut epithelial function by altering expression of mucus-associated proteins and antimicrobial peptides. Consequently, mice that have Ffar2-deficient ILC3s were more susceptible to both dextran sulfate sodium-induced colonic injury and C. rodentium infection. These results demonstrate that Ffar2 signaling affects colonic ILC3 proliferation and function in a cell-intrinsic manner and modulates ILC3 regulation of gut inflammatory tone and pathogen defense.

### Results

### Ffar2 Agonism Selectively Promotes Colonic ILC3 Expansion

[0281] Ffar2 regulates colonic Treg cell expansion and that Ffar2 expression in Treg cells in conjunction with SCFA supplementation conferred protection against T cell-transfer colitis³⁵. To test the therapeutic potential of Ffar2 agonism for inflammatory bowel disease in a preclinical model, a Ffar2 agonist³⁷ and examined its effects in the T cell-transfer colitis model. Although Ffar2 agonism significantly ameliorated colitis similar to the effect of sodium propionate, the Ffar2 agonist did not increase colonic Foxp3⁺Treg cell number (FIG. 7A-7B) in contrast to previously published results with short chain fatty acids³⁵. This unexpected result prompted an investigation to determine if a cell population present in Rag2^{-/-} mice receiving the transferred T cells, and thus an innate immune cell population, was required for Ffar2 agonism's effects on colitis mitigation and Foxp3⁺Treg cell population enhancement.

[0282] To investigate whether a colonic innate immune cell population is a target of Ffar2 agonism, Ffar2 expression levels were profiled in colonic innate immune populations and found that colonic innate lymphoid cells (ILCs) expressed higher levels of Ffar2 as compared to myeloid cells and granulocytes, which are known to express Ffar2^{34, 35} (FIG. 1A). Among colonic ILC populations, both ILC2s and ILC3s expressed significantly higher levels of Ffar2 compared to ILC1s (FIG. 1B). To determine whether colonic ILCs express functional Ffar2 on the cell surface, WT mice were fed Ffar2 agonist and analyzed colonic ILC populations. As expected, the Ffar2 agonist did not alter colonic ILC1 frequency or numbers (FIG. 1C). However, the Ffar2 agonist did increase RORγt⁺ ILC3 frequency and cell number, whereas GATA3⁺ ILC2s decreased in frequency but not in number (FIG. 1C). These data led to the experimental question of whether Ffar2 agonism selectively decreases ILC2s or increases ILC3s. To address this question, the expression of the proliferation marker Ki-67 was examined in colonic GATA3⁺ ILC2s and RORγt⁺ ILC3s from WT mice fed with the Ffar2 agonist. Colonic GATA3⁺ ILC2s exhibited limited Ki-67 expression and Ffar2 agonism did not alter the frequency of Ki-67-expressing ILC2s (FIG. 1D). In contrast, colonic RORγt⁺ ILC3s proliferated during steady state and Ffar2 agonism increased the frequency and number of Ki-67-expressing ILC3s (FIG. 1D).

[0283] Recently, butyrate has been reported to suppress Peyer's patch ILC3s³⁸. Acetate, propionate and butyrate are the three most abundant SCFAs in the colon³⁹ and these SCFAs differ in their agonism of Ffar2, with acetate and propionate functioning as far more potent activators of Ffar2⁴⁰. To confirm whether Ffar2 agonism by SCFAs regulates colonic ILC3s, mice were fed SCFAs or sodium chloride as a control and colonic ILC3s were analyzed. Sodium acetate and sodium propionate increased colonic ILC3 frequency and number, whereas sodium butyrate did not change colonic ILC3s (FIG. 7C). Thus, these data suggest that colonic ILC3s express functional Ffar2 and Ffar2 agonism selectively increases colonic RORγt⁺ ILC3s.

### Ffar2 Regulates Colonic ILC3 Proliferation and ILC3-Derived IL-22 Production

[0284] To decipher the role of Ffar2 in colonic ILC3s, RORγt-Cre Ffar2^{fl/fl} mice were generated. The population frequency and number of RORγt⁺ILC3 cells in RORγt-Cre Ffar2^{fl/fl} mice decreased compared to Ffar2^{fl/fl} mice, whereas total ILCs were unaffected by Ffar2 ablation (FIG. 2A and FIG. 8A). These data led us to ask whether Ffar2 regulates RORγt⁺ILC3 proliferation. Ki-67⁺ RORγt⁺ILC3 decreased in RORγt−Cre Ffar2^{fl/fl} mice compared to Ffar2^{fl/fl} mice, whereas Ki-67 expression in GATA3⁺ILC2s was not affected in either RORγt-Cre Ffar2^{fl/fl} or Ffar2^{fl/fl} mice (FIG. 2B and FIG. 8B). RORγt⁺ILC3s produce IL-22 and/or IL-17, both of which are key cytokines for ILC3 function^{1, 2}. Next, it was examined whether Ffar2 controls IL-22 and/or IL-17A production in RORγt⁺ILC3s. IL-22-producing ILC3s decreased whereas IL-17A-producing ILC3s were not altered in RORγt−Cre Ffar2^{fl/fl} mice compared to control (FIG. 3C). A subset of CD4⁺ T cells, T helper (Th) 17 cells, express RORγt and also produce IL-22 and/or IL-17^{41, 42}. In contrast to RORγt⁺ILC3s, RORγt−Cre Ffar2^{fl/fl} mice did not demonstrate alterations in colonic RORγt⁺ CD4⁺ T cell frequency and number (FIG. 8C). Neither IL-22 nor IL-17A production was affected in RORγt⁺ CD4⁺ T cells from RORγt−Cre Ffar2^{fl/fl} mice (FIG. 8D).

[0285] RORγt is a master transcription factor that regulates ILC3 development and function^{43, 44} and the aryl hydrocarbon receptor (AHR), a ligand-activated transcription factor, is also necessary for ILC3 proliferation and IL-22 production^{20, 21, 22.} It was observed that RORγt levels (MFI) in RORγt⁺ILC3s were reduced in the conditional knock-outs compared to controls while AHR expression was not affected in RORγt⁺ILC3s and IL-22 producing ILC3s (FIG. 2D-2E). Collectively, these data support that Ffar2 regulates colonic ILC3 proliferation and IL-22 production in a RORγt⁺ILC3 cell-intrinsic manner.

### Ffar2 Influences Colonic CCR6⁺ ILC3 Expansion and Function

[0286] The observation that colonic CCR6⁺ ILC3s expressed higher levels of both Ffar2 and RORγt compared to CCR6⁻ ILC3s (FIG. 9A) led us to ask whether Ffar2 regulates CCR6⁺ ILC3 expansion and function. CCR6⁺ ILC3s, in contrast with CCR6⁻ ILC3s and NKp46⁺ ILC3s, were decreased in conditional knock-outs compared to controls (FIG. 3A). Consistent with analysis of mRNA expression, it was found that CCR6⁺ ILC3s expressed higher level of RORγt compared to CCR6⁻ ILC3s and NKp46⁺ ILC3s and that RORγt levels in CCR6⁺ ILC3s were reduced in the conditional knock-outs compared to controls (FIG. 9B). CCR6⁺ ILC3s exhibited higher expression of Ki-67 compared to CCR6⁻ and NKp46⁺ ILC3s in conditional knock-outs and controls (FIG. 3B). Both percentage and number of Ki-67⁺ CCR6⁺ ILC3s and Ki-67⁺ CCR6⁻ ILC3s decreased in RORγt−Cre Ffar2^{fl/fl} mice (FIG. 3B).

[0287] Both CCR6⁺ and CCR6⁻ ILC3s are known to produce IL-22¹⁰. It was observed that the majority of CCR6⁺ ILC3s were IL-22− producing cells and the number of IL-22⁺ CCR6⁺ ILC3s decreased in RORγt−Cre Ffar2^{fl/fl} mice (FIG. 3C). CCR6⁻ and NKp46⁺ ILC3s showed reduced levels of IL-22 production compared to CCR6⁺ ILC3s in both conditional knock-outs and controls (FIG. 3C), suggesting that Ffar2 expression may contribute to colonic CCR6⁺ ILC3s abundance and functional import through regulation of cell proliferation and IL-22 production.

[0288] Given the effects of Ffar2 expression on CCR6⁺ ILC3s, which are localized in colonic lymphoid tissues^{17, 45}, it was examined whether Ffar2-expression within ILC3s affected these tissue structures. To analyze the distribution of colonic Ffar2-expressing ILC3s, RNA in situ hybridization was employed, due to poor anti-Ffar2 antibody availability and quality for formalin-fixed paraffin embedded tissues, and visualized and quantified Ffar2-expressing ILC3s in WT and Ffar2^{-/-} mice. Colonic RORγt⁺ CD3⁻ ILC3s clustered in colonic patches, composed of B cells and T cells, and in colonic solitary intestinal lymphoid tissues (SILTs), composed of B cells, dendritic cells and a few T cells, in both WT and Ffar2^{-/-} mice (FIG. 9C-9E). The number of colonic patches and SILTs was not different between WT and Ffar2^{-/-} mice, while the number of RORγt⁺ CD3⁻ ILC3s in colonic lymphoid tissues decreased in Ffar2^{-/-} mice compared to WT mice (FIG. 9F-9G). Consistent with these data, the number of Ffar2⁺RORγt⁺ CD3⁻ ILC3s in colonic patches and SILTs was decreased in the conditional knock-out compared to controls; while the number of colonic patches and SILTs did not change in conditional knock-outs and controls (FIG. 3D-3G). Collectively, these data support that Ffar2 is not required for the development of colonic lymphoid tissues but rather may contribute to ILC3 expansion in and recruitment to colonic lymphoid tissues.

### Ffar2 Regulates ILC3-Derived IL-22 Via AKT and STAT3 Activation

[0289] Ffar2 can couple with G_{i/o}, or G_{q} proteins and Ffar2 activation can inhibit cAMP and/or stimulate Ca²⁺ influx, eliciting intracellular signal cascades that regulate numerous cell-specific functions^{40, 46, 47}. Therefore, it was examined how Ffar2 signaling regulates colonic ILC3s and their function. Ffar2-deficient colonic ILC3s had reduced population frequencies and mean fluorescence intensities (MFIs) for phosphorylated AKT, p38, and ERK (FIG. 4A and FIG. 10A). Next, it was determined whether Ffar2 agonism activates these signaling molecules in colonic ILC3s. Ffar2 agonism increased phosphorylation of AKT, but not p38 and ERK in Ffar2-sufficient ILC3s (FIG. 4B and FIG. 10B-10C).

[0290] Phosphorylation of STAT3 (pSTAT3) is a significant regulator for ILC3-derived IL-22⁴⁸. Since Ffar2-deficient colonic ILC3s downregulated Il-22 expression (FIG. 10D) and RORγt−Cre Ffar2^{fl/fl} mice exhibited a reduction in IL-22− producing ILC3s (FIG. 2C), it was examined whether Ffar2 signaling regulates STAT3 activation in colonic ILC3s. Ffar2-deficient ILC3s showed a reduced level of pSTAT3⁺ compared to Ffar2-sufficient ILC3s, and Ffar2 agonism increased the frequency of pSTAT3 in Ffar2-sufficient ILC3s (FIGS. 4C-4D and FIGS. 10E-10F) suggesting Ffar2 signals can directly regulate STAT3 phosphorylation in ILC3, even though a smaller proportion of ILC3s respond to Ffar2 agonism as compared to the pAKT⁺ ILC3 population. These data prompted us to ask whether AKT activation downstream of Ffar2 directly affects the phosphorylation of STAT3 in ILC3s. It was discovered that inhibition of AKT via the AKT inhibitor (VIII), upon Ffar2 activation, impaired STAT3 activation in Ffar2-sufficient ILC3s (FIG. 4E). Next, signals downstream of Ffar2 activation were examined for their affect on ILC3-derived Il-22 production. Inhibition of STAT3 via a STAT3 inhibitor (S31), upon Ffar2 activation impaired Il-22 expression in colonic ILC3s. The AKT inhibitor also decreased 11-22, but to a lesser extent (FIG. 4F), suggesting Ffar2 agonism may be sufficient but not necessary for ILC3-derived IL-22. Together, these data demonstrate that Ffar2 signaling regulates colonic ILC3-derived Il-22 expression through an AKT and STAT3 axis.

### Ffar2-Expressing Colonic ILC3s Protect Against Intestinal Inflammation

[0291] IL-22− producing ILC3s play significant roles not only in tissue homeostasis but also in host defense by regulating gut epithelial barrier function^{13, 14, 49, 50}. Analysis of targeted gut epithelial transcriptional signatures from RORγt−Cre Ffar2^{fl/fl} mice revealed decreased mucin (Muc2, Muc3, Muc4, and Muc5b) and antimicrobial peptide (Reg3α, Reg3β, and Reg3γ) expression (FIG. 5A). IL-22 can ameliorate dextran sulfate sodium (DSS)-induced colonic injury by enhancing mucus production⁵¹. To determine whether Ffar2-expressing RORγt⁺ ILC3s regulate intestinal injury repair responses, a DSS colonic injury model was employed. RORγt−Cre Ffar2^{fl/fl} mice treated with DSS showed increased weight loss, shortened colon length, worse histology-based colitis score, and decreased RORγt⁺ ILC3s and IL-22− producing ILC3s compare to Ffar2^{fl/fl} mice (FIG. 5B-5F).

[0292] Antimicrobial peptides are a significant mechanism downstream of IL-22 that affords protection against attaching and effacing bacteria pathogens¹⁴. To test the role of Ffar2-expressing IL-22⁺ILC3s in bacterial infection, both RORγt−Cre Ffar2^{fl/fl} and Ffar2^{fl/fl} mice were inoculated with Citrobacter rodentium (C. rodentium). Consistent with the results in the DSS model; RORγt−Cre Ffar2^{fl/fl} mice displayed increased weight loss and shortened colon length, manifested higher levels of C. rodentium bacterial translocation to the liver and spleen, and reduced ILC3s and IL-22− producing ILC3s compared to Ffar2^{fl/fl} mice (FIGS. 6A-6E). Taken together, these data support that Ffar2 expression in ILC3 affords protection against large intestinal injury and bacterial infection.

### Discussion

[0293] Dietary and bacterial metabolites regulate immune responses and influence gut health and disease susceptibility. Some of these metabolites directly activate metabolite-sensing G-protein-coupled receptors (GPCRs) and these engagements induce immediate biological and immunological responses that contribute to mucosal homeostasis and intestinal immunity.

[0294] Herein, it was demonstrated that the metabolite-sensing GPCR Ffar2 is functionally expressed in colonic ILC3s and that Ffar2 agonism selectively promoted colonic ILC3 expansion and function. Ffar2 deficiency in ILC3s decreased their proliferation and IL-22 production and reduced expansion of ILC3s in colonic lymphoid tissues. Ffar2-deficient ILC3s downregulated AKT and MAPK signaling pathways. Ffar2 agonism specifically activated an ILC3 AKT and STA3 axis and regulated ILC3-derived IL-22 expression. In addition, Ffar2-deficient ILC3s led to impaired epithelial barrier function and resulted in increased susceptibility to intestinal injury and infection. The present study which unveils a heretofore unknown role for Ffar2 in ILC3 populations sheds light on a variety of aspects of ILC3 biology ranging from the contested role of the microbiota in affecting ILC3 populations to the transcriptional networks and their inputs that control ILC3.

[0295] Whether the microbiota affect ILC3 populations has remained controversial. Some studies suggest that germ-free mice exhibit a decrease in IL-22⁺NKp46⁺ ILC3s¹², whereas other studies have shown that the microbiota functions as a negative regulator of ILC3s in the small intestine⁴⁴. In these studies, colonic ILC3s decreased in germ-free WT mice and Ffar2 agonism by sodium acetate or an Ffar2 agonist increased colonic ILC3 numbers in germ-free WT mice (FIG. 7D-7F). Thus, these results provide additional evidence that the microbiota may regulate colonic ILC3 function and suggest that the microbial metabolite receptor Ffar2 serves as a positive regulator of colonic ILC3 expansion.

[0296] The present study also unveiled microbial metabolite receptor inputs for ILC3 transcriptional regulation. The master transcriptional factor, RORγt is significant for the regulation of ILC3 development and function. Besides RORγt, transcription factors such as Notch and AhR have been proposed to contribute to development of ILC3s⁵². While Notch signaling is especially important in fetal liver ILC3 precursors⁵³, AhR is necessary for adult ILC3 population maintenance and function. The AhR/ARNT complex promotes ILC3 survival by induction of Bcl-2, c-Kit, Il-7R, and Notch2 expression²¹. In addition, AhR together with RORγt regulate expression of IL-22 in the presence of IL-23²².

[0297] The previous studies support that Ffar2 is also a key regulator of ILC3 maintenance and function, and the data suggest that Ffar2 regulates RORγt levels in colonic ILC3s. It is not suggested that Ffar2 directly binds to RORγt or Il22 UTRs like Ahr complexes do; rather, signals downstream of Ffar2 mediate such effects. It was observed that Ffar2 signals activate AKT and MAKP kinase (p38 and ERK1/2) within ILC3s and generate adequate signal thresholds to maintain ILC3 pools within the total ILC population. Additionally, Ffar2 signaling led to STAT3 phosphorylation (pSTAT3) allowing optimized IL-22 production for gut homeostasis. Amplification of Ffar2 signals by Ffar2 agonism specifically induced AKT activation in ILC3s and increased pSTAT3⁺ ILC3s likely via AKT activation. The present data support that Ffar2 signaling actively participates in sensing environmental cues and establishing the tone and magnitude of ILC3 responses. In addition, by using RORγt−Cre Ffar2^{fl/fl} mice, wherein RORγt⁺ ILC3s are deficient in Ffar2, it was demonstrated a cell-intrinsic role for Ffar2 in colonic ILC3 proliferation and IL-22 production. In general, ILC3s are regulated by cell-extrinsic factors including cytokines, growth factors and dietary metabolites. IL-23 produced from CX3CR1⁺ macrophages and to some extent by CD103⁺CD11b⁺ dendritic cells is a key regulator of ILC3 activation^{54, 55}. RORγt−Cre Ffar2^{fl/fl} mice had similar expression levels of Il23 in the colon compared to Ffar2^{fl/fl} mice (FIG. 8E) and sorted Ffar2-sufficient and Ffar2-deficient colonic ILC3s showed the similar level of Il23R expression (FIG. 8F) suggesting the effect through IL-23 and IL-23R can be dampened in RORγt−Cre Ffar2^{fl/fl} mice. Thus, regulation of thresholds of Ffar2 signals by agonism or antagonism can be useful for ILC3 maintenance and lead to efficient gut homeostasis and defense.

[0298] ILC3 subsets share common functions and have transcriptionally and functionally distinct features in different tissue environments. Distribution of ILC3 subsets differs dependent upon tissue location. CCR6⁺ ILC3s (LTi-like ILC3s) are dominant in the colon and lymphoid tissues, whereas NKp46⁺ ILC3s (CCR6⁻ ILC3s) are prevalent in the small intestine and laminar propria¹⁹. It was observed that CCR6⁺ ILC3s were the majority of the colonic ILC3s and these cells were more proliferative and activated (higher IL-22 production) compared to CCR6⁻ ILC3 and NKp46⁺ ILC3s regardless of Ffar2 expression. This is in contrast with the small intestine, wherein CCR6⁺ ILC3s showed lower Ki-67 expression compared to NKp46⁺ ILC3s⁵⁶ and CCR6⁻ ILC3s produced higher amounts of cytokines including IL-22^{12, 44}. Since Ffar2 expression in CCR6⁺ ILC3s is most likely involved in their proliferation, IL-22 production and expansion; Ffar2 may affect CCR6⁺ ILC3s progenitor cells. CCR6⁺ ILC3s differentiate from lymphoid tissue inducer progenitors (LTiPs), while ILC1, ILC2, or ILC3 including CCR6⁻ and NKp46⁺ cells develop from ILC progenitors (ILCPs)³. Given that all colonic ILC subsets do not change in WT versus Ffar2^{-/-} mice or conditional knock-outs versus control mice, there seems to be no effect of Ffar2 on ILC3 development, but further analysis of each progenitor would be needed to confirm the role of Ffar2 in the development of CCR6⁺ ILC3s. Ffar2 can regulate transcriptional factors such as Notch in conjunction with T-bet and TOX, which have been proposed to contribute to development of NKp46⁺ ILC3s and LTi-like cells, respectively^{57, 58}. However, differences in Notch, T-bet, or TOX were not detected in sorted colonic CCR6⁺ or CCR6⁻ ILC3s from WT and Ffar2^{-/-} mice (FIG. 9H). The data support that Ffar2 regulates apoptotic/survival factors for colonic CCR6⁺ ILC3s. CCR6⁺ ILC3s in the small intestine expressed higher levels of the anti-apoptotic factor Bcl-2 compared to NKp46⁺ and CCR6⁻ ILC3s, and in general CCR6⁺ ILC3s are more resistant to γ_{c} cytokine depletion (IL-2, IL-7 or IL-15)⁵⁶. Further investigation of whether Ffar2 affects the expression of anti-apoptotic factors or IL-7R in colonic CCR6⁺ ILC3 may provide insight for a better understanding of the role of Ffar2 regulation in colonic ILC3 subsets. Notably, it was observed that Ffar2 induced accumulation of colonic ILC3s in lymphoid structures while Ffar2 is not likely required for lymphoid tissue formation. Whether Ffar2 is required for ILC3 recruitment to colonic lymphoid structures or whether Ffar2 mainly accelerates CCR6⁺ ILC3 expansion after the localization to colonic lymphoid tissues needs to be investigated further.

[0299] In summary, the present findings expand understanding of microbial metabolite-sensing receptors as significant regulators in ILC3 biology and ILC3-mediated mucosal immunity and elucidate the relevance of signal thresholds in regulating ILC3 function and ILC3 subset heterogeneity. To not be bound by a particular theory, this study raises the question of whether manipulating Ffar2 signaling thresholds modulate the plasticity of ILC3s, discriminates redundant or non-redundant ILC3 subset function in different tissue microenvironments, and regulates the onset or progression of intestinal injury and inflammation through fine-tuning of ILC3 responses. Ffar2 signaling appears to play a pivotal role in ILC3s, differentially coordinating interactions with adaptive immune cells or gut epithelial components and shaping ILC3-mediated gut immunity. Elucidation of the molecular links between the microbial metabolite-sensing receptor Ffar2 and ILC3 responses may lead to reconsideration and repositioning of Ffar2 as therapeutic target for treatment of intestinal diseases including inflammatory bowel disease.

### Example 2: Experimental Methods

[0300] Mice. C57BL/6J (wild-type) mice were bred in-house and originally purchased from Jackson Laboratory. Rorgt-Cre mice⁴³ on a C57BL/6J background were purchased from Jackson Laboratory and used only as heterozygotes. Ffar2^{fl/fl} mice on a C57BL/6J background were generously provided by Brian Layden (Northwestern University) and crossed with Rorgt-Cre mice to generate Rorgt-Cre x Ffar2^{fl/fl} mice. Ffar2^{-/-} mice were on C57BL/6 background and obtained from heterozygous x heterozygous breeding³⁵. Foxp3^{YFP-Cre} mice were bred in-house and originally provided by Dr. A. Rudensky (Memorial Sloan Kettering Cancer Center)⁵⁹. Littermate controls were used and animals were cohoused after weaning. Male and female mice were used at 7-12 weeks of age. In individual experiments, all animals were age and sex-matched; exact numbers of animal used per experiment are indicated in figure legends. All mice were housed in microisolator cages in the barrier facility of Harvard T.H. Chan School of Public Health. Animal studies and experiments were approved and carried out in accordance with Harvard Medical School's Standing Committee on Animals and the National Institutes of Health guidelines for animal use and care.

[0301] GPR43 agonist. Ffar2 agonist (ES43012-SOD) was synthesized and provided (See Bernard J. et al., 70th Scientific Sessions of the American Diabetes Association (Orlando, Fla.), Jun. 25-29th, 2010. Mice received 50 mg/kg/d of Ffar2 agonist dissolved in distilled water (5 ml/kg) provided by gentle oral administration twice a day for 1-2 weeks or the indicated duration. Germ-free (GF) mice were treated for 1-2 weeks with Ffar2 agonist (700 μM) dissolved in autoclaved drinking water and filtered sterilized.

[0302] SCFA intervention. WT mice were treated for 2 weeks with sodium acetate (150 mM) (S8750, Sigma), sodium propionate (150 mM) (P5436, Sigma), or sodium butyrate (100 mM) (303410, Sigma) in dissolved in their autoclaved drinking water and filter sterilized³⁵. WT mice received sodium chloride (150 mM). For GF mice, mice were treated for 2 weeks with sodium acetate (150 mM) and sodium chloride (150 mM) as a control in the drinking water. T-cell transfer colitis mice were treated for 6 weeks with sodium acetate (150 mM), sodium propionate (150 mM), sodium butyrate (100 mM), or sodium chloride (150 mM) as a control in the drinking water beginning at day 10. Drinking water solutions were freshly prepared and changed every 5 days.

[0303] Isolation of colonic epithelial cells and immune cells. Colons were dissected and fat and blood vessels were removed. Colons were cut open longitudinally and washed with PBS to remove feces and debris, then incubated in PBS containing 5 mM EDTA, 0.145 mg/ml Dithiothreitol (Sigma-Aldrich), 3% FBS and 1% penicillin/streptomycin (P/S) for 15 min at 37° C. for 2 cycles. After being vortexed for 15s, the dissociated cells were collected as colonic epithelial cells. For the isolation of lamina propria immune cells, the remaining colonic tissues were washed twice in PBS, cut into 1 mm in length, and digested in RPMI 1640 containing 0.5 mg/ml collagenase D (Roche), 0.01 mg/ml DNase I (Roche), and 0.5 mg/ml Dispase (Stem Cell Technologies) for 30 min at 37° C. on a shaking platform. The digested tissues were passed through 70 μm strainers after being vigorously vortexed for 15s. Then, colonic immune cells were collected and resuspended in PBS with 1% fetal bovine serum and 1% penicillin-streptomycin solution (Corning) for flow cytometry analysis, FACSAria sorting or RNA extraction.

[0304] Flow cytometry. Single-cell suspensions were stained with a combination of fluorescently conjugated monoclonal antibodies. CD16/32 antibody (93; BioLegend) was used to block the non-specific binding to Fc receptors before surface staining. Cells were stained with Fixable yellow dead cell stain kit (Invitrogen) for the detection of live/dead cells before staining of the cell surface. All antibodies were purchased from BioLegend unless otherwise specified. For surface marker staining, antibodies to the following mouse proteins were used: CD45 (30-F11), CD90.2 (53-2.1), lineage markers (17A2/RB6-8C5/RA3-6B2/Ter-119/M1/70), CCR6 (29-21.17), NKp46 (29A1.4), CD11b (M1/70), CD11c (N418), Gr-1 (RB6-8C5), MHC class II (M5/114.15.2), NK1.1 (PK136), KLRG1 (2F1), CD3c (145-2C11), CD4 (RM4.5).

[0305] For measurement of intracellular cytokine expression, cells were isolated ex vivo and stimulated with 50 ng/ml phorbol-12-myristate 13-acetate (PMA, Sigma-Aldrich) and 500 ng/ml ionomycin (Sigma-Aldrich) and Brefeldin (1000× solution, BioLegend) for 4 hr. Cells were subsequently surface-stained with a combination of the antibodies listed above, fixed and permeabilized using Foxp3 Fix/Perm Buffer set (BioLegend), and stained with IL-22− PerCP eFluor710 (1H8PWSR; eBioscience), and IL-17A-Alexa Fluor 488 (eBiol7B7; eBioscience).

[0306] For transcription factor expression, cell were isolated directly ex vivo, stained with antibodies to surface antigens, fixed and permeabilized according to the manufacturer's instructions (Foxp3 Fix/Perm Buffer set, BioLegend) and stained with phycoerythrin (PE) or Allophycocyanin (APC)-conjugated RORgt (B2D, Invitrogen), Alexa Fluor 488-conjugated GATA3 (L50-823, BD Biosciences), eFluor 660-conjugated Ahr (4MEJJ, eBioscience), Alexa 647-conjugated T-bet (4B10), PE-conjugated Foxp3 (FJK-16s, eBioscience), and PerCP eFluor710-conjugated Ki-67 (SolA15, eBiosciences).

[0307] For analysis of intracellular signaling in ILC3s (Ibiza et al., 2016), sorted colonic ILC3s were rested for 2 hours in RPMI at 37° C. Cells were unstimulated or stimulated with Ffar2 agonist (10 μM/ml dissolved in water, pH 7.4) for 30 min at 37° C., fixed and permeabilized according to the manufacturer's instructions (BD Cytofix and BD Phosflow Perm Buffer III, BD Biosciences), and stained with Alexa Fluor 647-conjugated anti-AKT (pS473) (D9E, Cell Signaling Technology), anti-p38 MAPK (pT180/pY182) (36/038, BD Biosciences), anti-pERK1/2(pT202/pY204) (E10, Cell Signaling Technology) or anti-STAT3 (pY705) (4/p-STAT3, BD Biosciences) for 30 min at room temperature.

[0308] Cells were stained in parallel with the respective control isotype antibodies. FMO controls were performed as well. Stained cells were acquired on a BD LSRII flow cytometry (BD Biosciences) and analyzed with FlowJo9 software (Tree Star). Colonic lamina propria immune cells were sorted to >95% purity using a FACSAria Hu at the Dana-Farber Cancer Institute Flow Cytometry Core.

[0309] RNA isolation and real-time quantitative PCR (qRT-PCR). For analysis of sorted colonic immune cell populations including ILC subsets and colonic ILC3s, RNA was isolated using the RNeasy Micro Kit (Qiagen) or RNeasy Mini Kit (Qiagen) according to the manufacturer's protocol. For analysis of colonic epithelial cells or colon tissues, cells or tissues were homogenized directly into Qiazol (Qiagen), and RNA was isolated via chloroform extraction. The quantity and quality of RNA was determined using a NanoDrop (Thermo Scientific). For both methods, cDNA was synthesized with iScript Reverse Transcription Supermix for RT-qPCR (Bio-Rad). Quantitative real-time PCR was carried out on cDNA with SYBR FAST Universal qPCR Master Mix (KAPA Biosystems). Reactions were run on a Stratagene Mx3005P machine (Agilent Technologies). The expression of individual genes was normalized to housekeeping gene β-actin expression on the base of the ΔΔCt algorithm. Some results are shown as a fold induction relative to expression levels in colonic epithelial cells as indicated. Primer sequences are listed in TABLE 2 below.

TABLE 2
REAL-TIME PCR PRIMER SEQUENCES

| Gene | Forward (5′-3′) | Reverse (5′-3′) |
|---|---|---|
| Ffar2 | AATTTCCTGGTGTGCTTTGG | ACCAGACCAACTTCTGGGTG |
| Rorc | GACCCACACCTCACAAATTGA | AGTAGGCCACATTACACTGCT |
| Il22 | ATGAGTTTTTCCCTTATGGGG | GCTGGAAGTTGGACACCTCAA |
| | AC | |
| Il22rα1 | ATGAAGACACTACTGACCATC | CAGCCACTTTCTCTCTCCGT |
| | CT | |
| Il23r | TTCAGATGGGCATGAATGTTT | CCAAATCCGAGCTGTTGTTCT |
| | CT | AT |
| Ccl20 | GTACTGCTGGCTCACCTCTG | TCCAATTCCATCCCAAAA |
| Muc2 | CAATGACAAGGTGTCCTGCC | GTGCTCTCCAAACTCTCTGG |
| Muc3 | CCGATGTCACCACTTCTGCTG | GCAGAGCAAGGCGTGATACAG |
| Muc4 | TGATGGAACAACCACCTCAC | GGATGCAGGTGAGGTATTC |
| Muc5b | GTGGCCTTGCTCATGGTGT | GGACGAAGGTGACATGCCT |
| Reg3α | TCACCTGGTCCTCAACAGTAT | GGAGCGATAAGCCTTGTAACC |
| | T | |
| Reg3β | CAGACCTGGTTTGATGCAGA | GAAGCCTCAGCGCTATTGAG |
| Reg3γ | TTCCTGTCCTCCATGATCAAA | CATCCACCTCTGTTGGGTTCA |
| | A | |
| Actin | TACCACCATGTACCCAGGCA | CTCAGGAGGAGCAATGATCTT |
| | | GA |

[0310] For quantitative RT-PCR of Tbx21, Notch, and Tox, RNA was retro-transcribed using a High Capacity RNA-to-cDNA Kit (Applied Biosystems), followed by a pre-amplification PCR using TaqMan PreAmp Master Mix (Applied Biosystems). TaqMan Gene Expression Master Mix (Applied Biosystems) was used in real-time PCR. TaqMan Gene Expression Assays bought from Applied Biosystems were the following: Gapdh Mm99999915_g1; Hprt1 Mm00446968_m1; Eefla1 Mm01973893_g1; Tbx21 Mm00450960_m1; Notch2 Mm00803077_m1; Tox Mm00455231_m1. Hprt1, Gapdh and Edfala1 were used as housekeeping genes.

[0311] Histology. Colons were cleaned with PBS prior to fixation in 4% PFA and then processed by routine paraffin embedding, sectioning and H&E staining. Colitis scores were determined by a pathologist (J. N. G.), who was blinded to the experimental parameters. Each of the four histologic parameters was scored as absent (0), mild (1), moderate (2), or severe (3): mononuclear cell infiltration, polymorphonuclear cell infiltration, epithelial hyperplasia, and epithelial injury. The scores for the parameters were summed to generate the cumulative histologic colitis score as previously described^{60, 61}. For the DSS-induced model, cumulative histologic scores were also quantified as to the percentage involvement by the disease process: (1)<10%; (2) 10-25%; (3) 30-50%; (4) >50% and presented as histologic colitis scores⁶² as follows: (cumulative score*involvement)+cumulative score.

[0312] RNA in situ hybridization and immunofluorescence staining. To detect Ffar2-expressing RORγt⁺ CD3⁻ ILC3s in the colon, RNA in situ hybridization was performed, then subsequently carried out immunofluorescence staining. Mouse colon tissues were fixed overnight in 10% neutral buffered formalin (NBF) followed by routine paraffin embedding and sectioning. RNA in situ hybridization was performed using the Advanced Cell Diagnostic RNAscope Multiplex Fluorescent Detection Kit v2 (323100, ACDBio) according to the manufacturer's instructions⁶³. In brief, colon sections were deparaffinized, pretreated with Target Retrieval Reagents and protease, hybridized with Mm-Ffar2 probe (433711, ACDBio) and Mm-Rorc-C2 probe (403661-C2, ACDBio), and then underwent amplification steps. Two different chromogenic substrates: TSA Cyanine 5 (NEL745E001KT, PerkinElmer) and TSA cyanine 3 (NEL744E001KT, PerkinElmer) were used to detect the Rorc and Ffar2 probes, respectively. Prior to DAPI counterstaining, immunofluorescence staining was performed following the Advanced Cell Diagnostic general recommendations (323100-TN). Briefly, the sample slides were blocked in Tris-buffered saline (TBS) 1% BSA and 5% goat serum for 1h at room temperature, stained with anti-CD3 primary antibody (Rabbit polyclonal, 5690, Abcam) overnight at 4° C. and then donkey anti-rabbit-HRP secondary antibody (711-035-152, Jackson ImmunoResearch) for 2h at room temperature. To detect CD3 positive cells, TSA Fluorescein reagent (NEL741E001KT, PerkinElmer) was used. The slides were counterstained with DAPI and mounted with Prolong Gold antifade mounting medium (P36934, Life Technologies). Images were acquired on a Nikon Eclipse NI-U equipped with a 20×, a 40× or a 60× objective or Nikon Eclipse Ti laser scanning microscope coupled with a 100× objective. Image analysis was performed using ImageJ. The number of colonic patches and SILTs were counted in whole colon tissue sections. For quantification of colonic ILC3s in the colonic tissues, 10 digital images of colonic patches or colonic SILTs were selected. The number of Rorc⁺ CD3⁻ ILC3 number per each lymphoid tissue was counted by subtracting the number of Rorc⁺ CD3⁺ double positive cells from that of Rorc⁺ cells with DAPI-positive signals. M.M. or E.C. performed quantification and were blinded to sample experimental identity.

[0313] AKT and STAT3 inhibition. Sorted colonic ILC3s were rested for 2 hours in RPMI at 37° C. For analysis of STAT3 phosphorylation, cells were incubated with 1004 AKT inhibitor VIII (VIII, Sigma-Aldrich) (Ibiza et al., 2016) or vehicle as a control (DMSO) for 1h at 37° C. before stimulation with the Ffar2 agonist (10 μM/ml dissolved in water, pH 7.4). To determine Il22 expression levels, cells were incubated with 10 μM AKT inhibitor VIII, 10 μM STAT3 inhibitor VI (S3I, Sigma-Aldrich) (Ibiza et al., 2016) or vehicle during overnight stimulation with Ffar2 agonist at 37° C.

[0314] T cell-transfer colitis model. Splenic T cells (CD3⁺CD4⁺CD25⁻CD45RB^{hi}) were sorted from C57BL/6J WT mice and injected i.p. into C57BL/6J Rag2^{-/-} mice (5×10⁵ cells/mouse). At day 10 post-splenic T cell injection, splenic Treg cells (CD3⁺CD4⁺Foxp3^{YFP+}) were sorted from Foxp3^{YFP-Cre} mice and adoptively transferred to recipients by i.v. injection (1×10⁵ cells/mouse). Mice were monitored weekly for weight loss and morbidity for 6-8 weeks as per the protocol's experimental endpoint guidelines and sacrificed at the terminal time point of 6 weeks post injection of splenic Treg cells.

[0315] DSS-induced colonic injury. Mice were treated with 3% (w/v) DSS (MP Biomedicals) ad libitum in drinking water for 5 days and followed by normal drinking water for 2 days. Body weight was measured every day and mice were euthanized at day 7. Colon length was measured. Colon was fixed with 4% paraformaldehyde for histology or used for the isolation of colonic immune cells or colonic epithelial cells as describe above.

[0316] Citrobacter rodentium infection. Citrobacter rodentium (DBS100 strain) was generously provided. Rorgt-Cre Ffar2^{fl/fl} mice or Ffar2^{fl/fl} mice were orally infected with 4×10⁹ CFU of C. rodentium⁶⁴. Mice were weighed daily. On day 7 after infection, the colon, spleen and liver were collected from the infected mice. For assessment of bacterial translocation⁶⁵, spleen and liver were weighed and homogenized with a TissueRuptor (Qiagen). The homogenates were plated on MacConkey agar plate and counted after overnight incubation at 37° C. under aerobic conditions. Colon length was measured and colons were used for the isolation of colonic immune cells or colonic epithelial cells as describe above.

[0317] Statistics. Data were analyzed with GraphPad Prism (version 7.0b). All data are represented as mean±s.e.m. For comparison between two independent experimental groups, an unpaired two-tailed Student's t-test when data were normally distributed or a two-tailed Mann-Whitney test was used. For comparison between more than two groups, one-way ANOVA followed by Tukey's test or by Dunnett's test was performed. No samples were excluded from any experiments performed in this study. Mice were randomized to experimental groups on weaning or 1 week prior to the start of an experimental intervention to avoid caged-based or housing bias. No blinding was used except for assignment of histologic scores and microscopy-based counting as noted above. Differences of P<0.05 were considered statistically significant.

### REFERENCES—EXAMPLE 1 AND EXAMPLE 2

[0318] 1. Spits, H. & Cupedo, T. Innate lymphoid cells: emerging insights in development, lineage relationships, and function. Annu Rev Immunol 30, 647-675 (2012).
[0319] 2. Artis, D. & Spits, H. The biology of innate lymphoid cells. Nature 517, 293-301 (2015).
[0320] 3. Vivier, E. et al. Innate Lymphoid Cells: 10 Years On. Cell 174, 1054-1066 (2018).
[0321] 4. Diefenbach, A., Colonna, M. & Koyasu, S. Development, differentiation, and diversity of innate lymphoid cells. Immunity 41, 354-365 (2014).
[0322] 5. Eberl, G., Colonna, M., Di Santo, J. P. & McKenzie, A. N. Innate lymphoid cells. Innate lymphoid cells: a new paradigm in immunology. Science 348, aaa6566 (2015).
[0323] 6. McKenzie, A. N. J., Spits, H. & Eberl, G. Innate lymphoid cells in inflammation and immunity. Immunity 41, 366-374 (2014).
[0324] 7. Sonnenberg, G. F. & Artis, D. Innate lymphoid cells in the initiation, regulation and resolution of inflammation. Nat Med 21, 698-708 (2015).
[0325] 8. Eberl, G. et al. An essential function for the nuclear receptor RORgamma(t) in the generation of fetal lymphoid tissue inducer cells. Nat Immunol 5, 64-73 (2004).
[0326] 9. Klose, C. S. et al. A T-bet gradient controls the fate and function of CCR6-RORgammat+ innate lymphoid cells. Nature 494, 261-265 (2013).
[0327] 10. Klose, C. S. & Artis, D. Innate lymphoid cells as regulators of immunity, inflammation and tissue homeostasis. Nat Immunol 17, 765-774 (2016).
[0328] 11. Sawa, S. et al. Lineage relationship analysis of RORgammat+ innate lymphoid cells. Science 330, 665-669 (2010).
[0329] 12. Satoh-Takayama, N. et al. Microbial flora drives interleukin 22 production in intestinal NKp46+ cells that provide innate mucosal immune defense. Immunity 29, 958-970 (2008).
[0330] 13. Sonnenberg, G. F., Monticelli, L. A., Elloso, M. M., Fouser, L. A. & Artis, D. CD4(+) lymphoid tissue-inducer cells promote innate immunity in the gut. Immunity 34, 122-134 (2011).
[0331] 14. Zheng, Y. et al. Interleukin-22 mediates early host defense against attaching and effacing bacterial pathogens. Nat Med 14, 282-289 (2008).
[0332] 15. Gladiator, A., Wangler, N., Trautwein-Weidner, K. & LeibundGut-Landmann, S. Cutting edge: IL-17-secreting innate lymphoid cells are essential for host defense against fungal infection. J Immunol 190, 521-525 (2013).
[0333] 16. Eberl, G. Inducible lymphoid tissues in the adult gut: recapitulation of a fetal developmental pathway? Nat Rev Immunol 5, 413-420 (2005).
[0334] 17. Baptista, A. P. et al. Colonic patch and colonic SILT development are independent and differentially regulated events. Mucosal Immunol 6, 511-521 (2013).
[0335] 18. Buettner, M. & Lochner, M. Development and Function of Secondary and Tertiary Lymphoid Organs in the Small Intestine and the Colon. Front Immunol 7, 342 (2016).
[0336] 19. Withers, D. R. & Hepworth, M. R. Group 3 Innate Lymphoid Cells: Communications Hubs of the Intestinal Immune System. Front Immunol 8, 1298 (2017).
[0337] 20. Kiss, E. A. et al. Natural aryl hydrocarbon receptor ligands control organogenesis of intestinal lymphoid follicles. Science 334, 1561-1565 (2011).
[0338] 21. Lee, J. S. et al. AHR drives the development of gut ILC22 cells and postnatal lymphoid tissues via pathways dependent on and independent of Notch. Nat Immunol 13, 144-151 (2011).
[0339] 22. Qiu, J. et al. The aryl hydrocarbon receptor regulates gut immunity through modulation of innate lymphoid cells. Immunity 36, 92-104 (2012).
[0340] 23. Mielke, L. A. et al. Retinoic acid expression associates with enhanced IL-22 production by gammadelta T cells and innate lymphoid cells and attenuation of intestinal inflammation. J Exp Med 210, 1117-1124 (2013).
[0341] 24. Ibiza, S. et al. Glial-cell-derived neuroregulators control type 3 innate lymphoid cells and gut defence. Nature 535, 440-443 (2016).
[0342] 25. Saha, S., Rajpal, D. K. & Brown, J. R. Human microbial metabolites as a source of new drugs. Drug Discov Today 21, 692-698 (2016).
[0343] 26. Rooks, M. G. & Garrett, W. S. Gut microbiota, metabolites and host immunity. Nat Rev Immunol 16, 341-352 (2016).
[0344] 27. Tan, J. et al. The role of short-chain fatty acids in health and disease. Adv Immunol 121, 91-119 (2014).
[0345] 28. Trompette, A. et al. Gut microbiota metabolism of dietary fiber influences allergic airway disease and hematopoiesis. Nat Med 20, 159-166 (2014).
[0346] 29. Erny, D. et al. Host microbiota constantly control maturation and function of microglia in the CNS. Nat Neurosci 18, 965-977 (2015).
[0347] 30. Perry, R. J. et al. Acetate mediates a microbiome-brain-beta-cell axis to promote metabolic syndrome. Nature 534, 213-217 (2016).
[0348] 31. Thorburn, A. N., Macia, L. & Mackay, C. R. Diet, metabolites, and “western-lifestyle” inflammatory diseases. Immunity 40, 833-842 (2014).
[0349] 32. Koh, A., De Vadder, F., Kovatcheva-Datchary, P. & Backhed, F. From Dietary Fiber to Host Physiology: Short-Chain Fatty Acids as Key Bacterial Metabolites. Cell 165, 1332-1345 (2016).
[0350] 33. Tan, J. K., McKenzie, C., Marino, E., Macia, L. & Mackay, C. R. Metabolite-Sensing G Protein-Coupled Receptors-Facilitators of Diet-Related Immune Regulation. Annu Rev Immunol 35, 371-402 (2017).
[0351] 34. Maslowski, K. M. et al. Regulation of inflammatory responses by gut microbiota and chemoattractant receptor GPR43. Nature 461, 1282-1286 (2009).
[0352] 35. Smith, P. M. et al. The microbial metabolites, short-chain fatty acids, regulate colonic Treg cell homeostasis. Science 341, 569-573 (2013).
[0353] 36. Marino, E. et al. Gut microbial metabolites limit the frequency of autoimmune T cells and protect against type 1 diabetes. Nat Immunol 18, 552-562 (2017).
[0354] 37. Forbes, S. et al. Selective FFA2 Agonism Appears to Act via Intestinal PYY to Reduce Transit and Food Intake but Does Not Improve Glucose Tolerance in Mouse Models. Diabetes 64, 3763-3771 (2015).
[0355] 38. Kim, S. H., Cho, B. H., Kiyono, H. & Jang, Y. S. Microbiota-derived butyrate suppresses group 3 innate lymphoid cells in terminal ileal Peyer's patches. Sci Rep 7, 3980 (2017).
[0356] 39. Cummings, J. H., Pomare, E. W., Branch, W. J., Naylor, C. P. & Macfarlane, G. T. Short chain fatty acids in human large intestine, portal, hepatic and venous blood. Gut 28, 1221-1227 (1987).
[0357] 40. Le Poul, E. et al. Functional characterization of human receptors for short chain fatty acids and their role in polymorphonuclear cell activation. J Biol Chem 278, 25481-25489 (2003).
[0358] 41. Ivanov, I I et al. The orphan nuclear receptor RORgammat directs the differentiation program of proinflammatory IL-17+T helper cells. Cell 126, 1121-1133 (2006).
[0359] 42. Korn, T., Bettelli, E., Oukka, M. & Kuchroo, V. K. IL-17 and Th17 Cells. Annu Rev Immunol 27, 485-517 (2009).
[0360] 43. Eberl, G. & Littman, D. R. Thymic origin of intestinal alphabeta T cells revealed by fate mapping of RORgammat+ cells. Science 305, 248-251 (2004).
[0361] 44. Sawa, S. et al. RORgammat+ innate lymphoid cells regulate intestinal homeostasis by integrating negative signals from the symbiotic microbiota. Nat Immunol 12, 320-326 (2011).
[0362] 45. Emgard, J. et al. Oxysterol Sensing through the Receptor GPR183 Promotes the Lymphoid-Tissue-Inducing Function of Innate Lymphoid Cells and Colonic Inflammation. Immunity 48, 120-132 e128 (2018).
[0363] 46. Brown, A. J. et al. The Orphan G protein-coupled receptors GPR41 and GPR43 are activated by propionate and other short chain carboxylic acids. J Biol Chem 278, 11312-11319 (2003).
[0364] 47. Nilsson, N. E., Kotarsky, K., Owman, C. & Olde, B. Identification of a free fatty acid receptor, FFA2R, expressed on leukocytes and activated by short-chain fatty acids. Biochem Biophys Res Commun 303, 1047-1052 (2003).
[0365] 48. Guo, X. et al. Induction of innate lymphoid cell-derived interleukin-22 by the transcription factor STAT3 mediates protection against intestinal infection. Immunity 40, 25-39 (2014).
[0366] 49. Sanos, S. L., Vonarbourg, C., Mortha, A. & Diefenbach, A. Control of epithelial cell function by interleukin-22-producing RORgammat+ innate lymphoid cells. Immunology 132, 453-465 (2011).
[0367] 50. Rutz, S., Eidenschenk, C. & Ouyang, W. IL-22, not simply a Th17 cytokine. Immunol Rev 252, 116-132 (2013).
[0368] 51. Sugimoto, K. et al. IL-22 ameliorates intestinal inflammation in a mouse model of ulcerative colitis. J Clin Invest 118, 534-544 (2008).
[0369] 52. Serafini, N., Vosshenrich, C. A. & Di Santo, J. P. Transcriptional regulation of innate lymphoid cell fate. Nat Rev Immunol 15, 415-428 (2015).
[0370] 53. Cherrier, M., Sawa, S. & Eberl, G. Notch, Id2, and RORgammat sequentially orchestrate the fetal development of lymphoid tissue inducer cells. J Exp Med 209, 729-740 (2012).
[0371] 54. Longman, R. S. et al. CX(3)CR1(+) mononuclear phagocytes support colitis-associated innate lymphoid cell production of IL-22. J Exp Med 211, 1571-1583 (2014).
[0372] 55. Kinnebrew, M. A. et al. Interleukin 23 production by intestinal CD103(+)CD11b(+) dendritic cells in response to bacterial flagellin enhances mucosal innate immune defense. Immunity 36, 276-287 (2012).
[0373] 56. Robinette, M. L. et al. IL-15 sustains IL-7R-independent ILC2 and ILC3 development. Nat Commun 8, 14601 (2017).
[0374] 57. Rankin, L. C. et al. The transcription factor T-bet is essential for the development of NKp46+ innate lymphocytes via the Notch pathway. Nat Immunol 14, 389-395 (2013).
[0375] 58. Aliahmad, P., de la Tone, B. & Kaye, J. Shared dependence on the DNA-binding factor TOX for the development of lymphoid tissue-inducer cell and NK cell lineages. Nat Immunol 11, 945-952 (2010).
[0376] 59. Bjursell, M. et al. Improved glucose control and reduced body fat mass in free fatty acid receptor 2-deficient mice fed a high-fat diet. Am J Physiol Endocrinol Metab 300, E211-220 (2011).
[0377] 60. Garrett, W. S. et al. Communicable ulcerative colitis induced by T-bet deficiency in the innate immune system. Cell 131, 33-45 (2007).
[0378] 61. Garrett, W. S. et al. Colitis-associated colorectal cancer driven by T-bet deficiency in dendritic cells. Cancer Cell 16, 208-219 (2009).
[0379] 62. Dieleman, L. A. et al. Chronic experimental colitis induced by dextran sulphate sodium (DSS) is characterized by Th1 and Th2 cytokines. Clin Exp Immunol 114, 385-391 (1998).
[0380] 63. Wang, F. et al. RNAscope: a novel in situ RNA analysis platform for formalin-fixed, paraffin-embedded tissues. J Mol Diagn 14, 22-29 (2012).
[0381] 64. Crepin, V. F., Collins, J. W., Habibzay, M. & Frankel, G. Citrobacter rodentium mouse model of bacterial infection. Nat Protoc 11, 1851-1876 (2016).
[0382] 65. Bhinder, G. et al. The Citrobacter rodentium mouse model: studying pathogen and host contributions to infectious colitis. J Vis Exp, e50222 (2013).

### Example 3: FFar2 Regulates Colonic ILC3-Derived IL-22 Via AKT and STAT3 Activation

[0383] To investigate the signaling downstream of Ffar2 underpinning ILC3-derived IL-22 production, colonic ILC3s were sorted and stimulated the cells ex vivo with acetate, propionate, or the Ffar2 agonist described herein. The Ffar2 agonist and, to a lesser extent, propionate increased IL-22 expression in sorted ILC3s while acetate did not alter IL22 expression (FIG. 11A). The in vitro BrdU incorporation analysis showed that acetate increased the percentage of BrdU+ ILC3s while propionate did not (FIG. 12A), supporting that acetate regulates colonic ILC3 expansion but not ILC3-derived IL-22 production. Ffar2 can couple with Gi/o and/or Gq proteins, and Ffar2 activation can inhibit cyclic AMP (cAMP) and/or stimulate Ca2+ influx, eliciting intracellular signaling that regulates numerous cell-specific functions (Brown et al., 2003; Le Poul et al., 2003; Nilsson et al., 2003).

[0384] A Gi/o inhibitor (pertussis toxin [PTX]) and a Gq inhibitor (YM-254890) were employed to determine whether distinctive forms of Ffar2 agonism examined herein differentially affect ILC3-derived IL-22 through direct involvement of Ffar2 downstream canonical signal pathways. Both PTX and YM-254890 abolished IL22 expression in sorted ILC3s stimulated with the synthetic Ffar2 agonist (FIG. 11B). However, these Gi/o and Gq inhibitors, upon activation with propionate, decreased IL22 transcripts to a lesser extent (FIG. 11C). This suggests that the synthetic Ffar2 agonist is likely more efficient in Gi/o and Gq subunit-mediated signaling of Ffar2 compared with propionate and that propionate may engage additional signaling pathways downstream of Ffar2. These findings are consistent with the differential affinities of these agonists for Ffar2. A phosphoprotein expression analysis suggested that Ffar2 agonism with SCFA activated mitogen-activated protein (MAP) kinase pathways, PI3K-AKT, and PKC via Gi/o or Gq proteins in neutrophils (Maslowski et al., 2009).

[0385] To further evaluate how Ffar2 signaling regulates colonic ILC3-derived IL-22, protein phosphorylation of candidate Ffar2 downstream effectors were determined by flow cytometry. Ffar2′ ILC3s exhibited reduced percentage and MFI for phosphorylated AKT, p38, and ERK (FIG. 11D and FIG. 12B). Given that STAT3 phosphorylation (pSTAT3) is a critical regulator for ILC3-derived IL-22 (Guo et al., 2014), we examined if Ffar2 signaling regulates STAT3 activation in colonic ILC3s. Ffar2′ ILC3s showed a decreased percentage of pSTAT3+ compared with WT ILC3s (FIG. 11E and FIG. 12C).

[0386] To evaluate if Ffar2 agonism activates these signaling molecules in colonic ILC3s, sorted ILC3s were stimulated with propionate or the synthetic Ffar2 agonist ex vivo. The synthetic Ffar2 agonist increased AKT and STAT3 phosphorylation, but not p38 and ERK, in WT ILC3s (FIG. 11F and FIG. 12D). As expected, treatment of Ffar2 ILC3s with the synthetic Ffar2 agonist had no effect on these signaling molecules (FIG. 12E). In contrast, propionate did not induce phosphorylation of these molecules in WT ILC3s (FIG. 11F). However, given that propionate has lower potency for Ffar2 compared with the synthetic Ffar2 agonist and that propionate is likely to induce ERK phosphorylation (pERK) (FIG. 11F), it was determined if a longer treatment with propionate would activate ERK signaling in WT ILC3s. The longer stimulation (1 h versus 30 min) did induce a higher pERK in sorted ILC3s, but the percentage of pERK+ ILC3s was comparable to that observed with the shorter time (FIG. 12F). Under these conditions, it was determined whether the longer time with propionate led to pSTAT3 in ILC3s. Propionate did increase pSTAT3+ ILC3s, but only 1%-1.5% of the ILC3s were pSTAT3+ (FIG. 12G).

[0387] Next, Ffar2 agonism-induced signaling pathways were tested to determine whether this pathway directly affected IL-22 expression in sorted ILC3s. ILC3s were pretreated with an AKT or an ERK inhibitor prior to stimulation with the Ffar2 agonist or propionate, respectively. The AKT inhibitor, upon Ffar2 activation with the synthetic Ffar2 agonist, decreased Il22 expression in colonic ILC3s, similar to the STAT3 inhibitor (FIG. 11G). In contrast, the ERK inhibitor, prior to the longer propionate stimulation, did not affect IL-22 expression in sorted ILC3s (FIG. 12H). Also, inhibition of AKT upon Ffar2 activation with the agonist impaired STAT3 activation in ILC3s (FIG. 11H), supporting that AKT activation downstream of Ffar2 may directly affect STAT3 phosphorylation in ILC3s. Collectively, these data support that Ffar2 agonism by the synthetic Ffar2 agonist or propionate differentially regulates colonic ILC3-derived IL-22 expression via AKT and STAT3 axis or partially via ERK and STAT3 activation.

[0388] In addition, it was shown that the chemicals, peptides, and recombinant proteins described in TABLE 1, can also be used to modulate Ffar2 activity.

SEQUENCES
(FFAR2 amino acid sequence)
SEQ ID NO: 1
MLPDWKSSLILMAYIIIFLTGLPANLLALRAFVGRIRQPQPAPVHILLLS
LTLADLLLLLLLPFKIIEAASNFRWYLPKVVCALTSFGFYSSIYCSTWLL
AGISIERYLGVAFPVQYKLSRRPLYGVIAALVAWVMSFGHCTIVIIVQYL
NTTEQVRSGNEITCYENFTDNQLDVVLPVRLELCLVLFFIPMAVTIFCYW
RFVWIMLSQPLVGAQRRRRAVGLAVVTLLNFLVCFGPYNVSHLVGYHQRK
SPWWRSIAVVFSSLNASLDPLLFYFSSSVVRRAFGRGLQVLRNQGSSLLG
RRGKDTAEGTNEDRGVGQGEGMPSSDFITE
(FFAR2 gene sequence)
SEQ ID NO: 2
See NCBI Reference Sequence: NC_000019.10

The application's sequence listing, which the Patent Office published only in electronic form, follows.

SEQUENCE LISTING (30 sequences)

SEQ ID NO: 1 - protein, 330 aa, Homo sapiens
MLPDWKSSLILMAYIIIFLTGLPANLLALRAFVGRIRQPQPAPVHILLLSLTLADLLLLLLLPFKIIEAASNFRWYLPKVVCALTSFGFYSSIYCSTWLLAGISIERYLGVAFPVQYKLSRRPLYGVIAALVAWVMSFGHCTIVIIVQYLNTTEQVRSGNEITCYENFTDNQLDVVLPVRLELCLVLFFIPMAVTIFCYWRFVWIMLSQPLVGAQRRRRAVGLAVVTLLNFLVCFGPYNVSHLVGYHQRKSPWWRSIAVVFSSLNASLDPLLFYFSSSVVRRAFGRGLQVLRNQGSSLLGRRGKDTAEGTNEDRGVGQGEGMPSSDFTTE

SEQ ID NO: 2 - DNA, 58617616 bp, Homo sapiens (residues 1-2,171,023 of 58,617,616)
  modified_base (1)..(60000): a, c, t, g, unknown or other
  modified_base (24448981)..(24498980): a, c, t, g, unknown or other
  modified_base (24552653)..(24552752): a, c, t, g, unknown or other
  modified_base (24891257)..(24891356): a, c, t, g, unknown or other
  modified_base (24895791)..(24895890): a, c, t, g, unknown or other
  modified_base (24898314)..(24904771): a, c, t, g, unknown or other
  modified_base (24908590)..(24908689): a, c, t, g, unknown or other
  modified_base (27190875)..(27240874): a, c, t, g, unknown or other
  modified_base (58607617)..(58617616): a, c, t, g, unknown or other
nnnnnnnnnnnnnnnnnnnnnnnnnnnnnnnnnnnnnnnnnnnnnnnnnnnnnnnnnnnnnnnnnnnnnnnnnnnnnnnnnnnnnnnnnnnnnnnnnnnnnnnnnnnnnnnnnnnnnnnnnnnnnnnnnnnnnnnnnnnnnnnnnnnnnnnnnnnnnnnnnnnnnnnnnnnnnnnnnnnnnnnnnnnnnnnnnnnnnnnnnnnnnnnnnnnnnnnnnnnnnnnnnnnnnnnnnnnnnnnnnnnnnnnnnnnnnnnnnnnnnnnnnnnnnnnnnnnnnnnnnnnnnnnnnnnnnnnnnnnnnnnnnnnnnnnnnnnnnnnnnnnnnnnnnnnnnnnnnnnnnnnnnnnnnnnnnnnnnnnnnnnnnnnnnnnnnnnnnnnnnnnnnnnnnnnnnnnnnnnnnnnnnnnnnnnnnnnnnnnnnnnnnnnnnnnnnnnnnnnnnnnnnnnnnnnnnnnnnnnnnnnnnnnnnnnnnnnnnnnnnnnnnnnnnnnnnnnnnnnnnnnnnnnnnnnnnnnnnnnnnnnnnnnnnnnnnnnnnnnnnnnnnnnnnnnnnnnnnnnnnnnnnnnnnnnnnnnnnnnnnnnnnnnnnnnnnnnnnnnnnnnnnnnnnnnnnnnnnnnnnnnnnnnnnnnnnnnnnnnnnnnnnnnnnnnnnnnnnnnnnnnnnnnnnnnnnnnnnnnnnnnnnnnnnnnnnnnnnnnnnnnnnnnnnnnnnnnnnnnnnnnnnnnnnnnnnnnnnnnnnnnnnnnnnnnnnnnnnnnnnnnnnnnnnnnnnnnnnnnnnnnnnnnnnnnnnnnnnnnnnnnnnnnnnnnnnnnnnnnnnnnnnnnnnnnnnnnnnnnnnnnnnnnnnnnnnnnnnnnnnnnnnnnnnnnnnnnnnnnnnnnnnnnnnnnnnnnnnnnnnnnnnnnnnnnnnnnnnnnnnnnnnnnnnnnnnnnnnnnnnnnnnnnnnnnnnnnnnnnnnnnnnnnnnnnnnnnnnnnnnnnnnnnnnnnnnnnnnnnnnnnnnnnnnnnnnnnnnnnnnnnnnnnnnnnnnnnnnnnnnnnnnnnnnnnnnnnnnnnnnnnnnnnnnnnnnnnnnnnnnnnnnnnnnnnnnnnnnnnnnnnnnnnnnnnnnnnnnnnnnnnnnnnnnnnnnnnnnnnnnnnnnnnnnnnnnnnnnnnnnnnnnnnnnnnnnnnnnnnnnnnnnnnnnnnnnnnnnnnnnnnnnnnnnnnnnnnnnnnnnnnnnnnnnnnnnnnnnnnnnnnnnnnnnnnnnnnnnnnnnnnnnnnnnnnnnnnnnnnnnnnnnnnnnnnnnnnnnnnnnnnnnnnnnnnnnnnnnnnnnnnnnnnnnnnnnnnnnnnnnnnnnnnnnnnnnnnnnnnnnnnnnnnnnnnnnnnnnnnnnnnnnnnnnnnnnnnnnnnnnnnnnnnnnnnnnnnnnnnnnnnnnnnnnnnnnnnnnnnnnnnnnnnnnnnnnnnnnnnnnnnnnnnnnnnnnnnnnnnnnnnnnnnnnnnnnnnnnnnnnnnnnnnnnnnnnnnnnnnnnnnnnnnnnnnnnnnnnnnnnnnnnnnnnnnnnnnnnnnnnnnnnnnnnnnnnnnnnnnnnnnnnnnnnnnnnnnnnnnnnnnnnnnnnnnnnnnnnnnnnnnnnnnnnnnnnnnnnnnnnnnnnnnnnnnnnnnnnnnnnnnnnnnnnnnnnnnnnnnnnnnnnnnnnnnnnnnnnnnnnnnnnnnnnnnnnnnnnnnnnnnnnnnnnnnnnnnnnnnnnnnnnnnnnnnnnnnnnnnnnnnnnnnnnnnnnnnnnnnnnnnnnnnnnnnnnnnnnnnnnnnnnnnnnnnnnnnnnnnnnnnnnnnnnnnnnnnnnnnnnnnnnnnnnnnnnnnnnnnnnnnnnnnnnnnnnnnnnnnnnnnnnnnnnnnnnnnnnnnnnnnnnnnnnnnnnnnnnnnnnnnnnnnnnnnnnnnnnnnnnnnnnnnnnnnnnnnnnnnnnnnnnnnnnnnnnnnnnnnnnnnnnnnnnnnnnnnnnnnnnnnnnnnnnnnnnnnnnnnnnnnnnnnnnnnnnnnnnnnnnnnnnnnnnnnnnnnnnnnnnnnnnnnnnnnnnnnnnnnnnnnnnnnnnnnnnnnnnnnnnnnnnnnnnnnnnnnnnnnnnnnnnnnnnnnnnnnnnnnnnnnnnnnnnnnnnnnnnnnnnnnnnnnnnnnnnnnnnnnnnnnnnnnnnnnnnnnnnnnnnnnnnnnnnnnnnnnnnnnnnnnnnnnnnnnnnnnnnnnnnnnnnnnnnnnnnnnnnnnnnnnnnnnnnnnnnnnnnnnnnnnnnnnnnnnnnnnnnnnnnnnnnnnnnnnnnnnnnnnnnnnnnnnnnnnnnnnnnnnnnnnnnnnnnnnnnnnnnnnnnnnnnnnnnnnnnnnnnnnnnnnnnnnnnnnnnnnnnnnnnnnnnnnnnnnnnnnnnnnnnnnnnnnnnnnnnnnnnnnnnnnnnnnnnnnnnnnnnnnnnnnnnnnnnnnnnnnnnnnnnnnnnnnnnnnnnnnnnnnnnnnnnnnnnnnnnnnnnnnnnnnnnnnnnnnnnnnnnnnnnnnnnnnnnnnnnnnnnnnnnnnnnnnnnnnnnnnnnnnnnnnnnnnnnnnnnnnnnnnnnnnnnnnnnnnnnnnnnnnnnnnnnnnnnnnnnnnnnnnnnnnnnnnnnnnnnnnnnnnnnnnnnnnnnnnnnnnnnnnnnnnnnnnnnnnnnnnnnnnnnnnnnnnnnnnnnnnnnnnnnnnnnnnnnnnnnnnnnnnnnnnnnnnnnnnnnnnnnnnnnnnnnnnnnnnnnnnnnnnnnnnnnnnnnnnnnnnnnnnnnnnnnnnnnnnnnnnnnnnnnnnnnnnnnnnnnnnnnnnnnnnnnnnnnnnnnnnnnnnnnnnnnnnnnnnnnnnnnnnnnnnnnnnnnnnnnnnnnnnnnnnnnnnnnnnnnnnnnnnnnnnnnnnnnnnnnnnnnnnnnnnnnnnnnnnnnnnnnnnnnnnnnnnnnnnnnnnnnnnnnnnnnnnnnnnnnnnnnnnnnnnnnnnnnnnnnnnnnnnnnnnnnnnnnnnnnnnnnnnnnnnnnnnnnnnnnnnnnnnnnnnnnnnnnnnnnnnnnnnnnnnnnnnnnnnnnnnnnnnnnnnnnnnnnnnnnnnnnnnnnnnnnnnnnnnnnnnnnnnnnnnnnnnnnnnnnnnnnnnnnnnnnnnnnnnnnnnnnnnnnnnnnnnnnnnnnnnnnnnnnnnnnnnnnnnnnnnnnnnnnnnnnnnnnnnnnnnnnnnnnnnnnnnnnnnnnnnnnnnnnnnnnnnnnnnnnnnnnnnnnnnnnnnnnnnnnnnnnnnnnnnnnnnnnnnnnnnnnnnnnnnnnnnnnnnnnnnnnnnnnnnnnnnnnnnnnnnnnnnnnnnnnnnnnnnnnnnnnnnnnnnnnnnnnnnnnnnnnnnnnnnnnnnnnnnnnnnnnnnnnnnnnnnnnnnnnnnnnnnnnnnnnnnnnnnnnnnnnnnnnnnnnnnnnnnnnnnnnnnnnnnnnnnnnnnnnnnnnnnnnnnnnnnnnnnnnnnnnnnnnnnnnnnnnnnnnnnnnnnnnnnnnnnnnnnnnnnnnnnnnnnnnnnnnnnnnnnnnnnnnnnnnnnnnnnnnnnnnnnnnnnnnnnnnnnnnnnnnnnnnnnnnnnnnnnnnnnnnnnnnnnnnnnnnnnnnnnnnnnnnnnnnnnnnnnnnnnnnnnnnnnnnnnnnnnnnnnnnnnnnnnnnnnnnnnnnnnnnnnnnnnnnnnnnnnnnnnnnnnnnnnnnnnnnnnnnnnnnnnnnnnnnnnnnnnnnnnnnnnnnnnnnnnnnnnnnnnnnnnnnnnnnnnnnnnnnnnnnnnnnnnnnnnnnnnnnnnnnnnnnnnnnnnnnnnnnnnnnnnnnnnnnnnnnnnnnnnnnnnnnnnnnnnnnnnnnnnnnnnnnnnnnnnnnnnnnnnnnnnnnnnnnnnnnnnnnnnnnnnnnnnnnnnnnnnnnnnnnnnnnnnnnnnnnnnnnnnnnnnnnnnnnnnnnnnnnnnnnnnnnnnnnnnnnnnnnnnnnnnnnnnnnnnnnnnnnnnnnnnnnnnnnnnnnnnnnnnnnnnnnnnnnnnnnnnnnnnnnnnnnnnnnnnnnnnnnnnnnnnnnnnnnnnnnnnnnnnnnnnnnnnnnnnnnnnnnnnnnnnnnnnnnnnnnnnnnnnnnnnnnnnnnnnnnnnnnnnnnnnnnnnnnnnnnnnnnnnnnnnnnnnnnnnnnnnnnnnnnnnnnnnnnnnnnnnnnnnnnnnnnnnnnnnnnnnnnnnnnnnnnnnnnnnnnnnnnnnnnnnnnnnnnnnnnnnnnnnnnnnnnnnnnnnnnnnnnnnnnnnnnnnnnnnnnnnnnnnnnnnnnnnnnnnnnnnnnnnnnnnnnnnnnnnnnnnnnnnnnnnnnnnnnnnnnnnnnnnnnnnnnnnnnnnnnnnnnnnnnnnnnnnnnnnnnnnnnnnnnnnnnnnnnnnnnnnnnnnnnnnnnnnnnnnnnnnnnnnnnnnnnnnnnnnnnnnnnnnnnnnnnnnnnnnnnnnnnnnnnnnnnnnnnnnnnnnnnnnnnnnnnnnnnnnnnnnnnnnnnnnnnnnnnnnnnnnnnnnnnnnnnnnnnnnnnnnnnnnnnnnnnnnnnnnnnnnnnnnnnnnnnnnnnnnnnnnnnnnnnnnnnnnnnnnnnnnnnnnnnnnnnnnnnnnnnnnnnnnnnnnnnnnnnnnnnnnnnnnnnnnnnnnnnnnnnnnnnnnnnnnnnnnnnnnnnnnnnnnnnnnnnnnnnnnnnnnnnnnnnnnnnnnnnnnnnnnnnnnnnnnnnnnnnnnnnnnnnnnnnnnnnnnnnnnnnnnnnnnnnnnnnnnnnnnnnnnnnnnnnnnnnnnnnnnnnnnnnnnnnnnnnnnnnnnnnnnnnnnnnnnnnnnnnnnnnnnnnnnnnnnnnnnnnnnnnnnnnnnnnnnnnnnnnnnnnnnnnnnnnnnnnnnnnnnnnnnnnnnnnnnnnnnnnnnnnnnnnnnnnnnnnnnnnnnnnnnnnnnnnnnnnnnnnnnnnnnnnnnnnnnnnnnnnnnnnnnnnnnnnnnnnnnnnnnnnnnnnnnnnnnnnnnnnnnnnnnnnnnnnnnnnnnnnnnnnnnnnnnnnnnnnnnnnnnnnnnnnnnnnnnnnnnnnnnnnnnnnnnnnnnnnnnnnnnnnnnnnnnnnnnnnnnnnnnnnnnnnnnnnnnnnnnnnnnnnnnnnnnnnnnnnnnnnnnnnnnnnnnnnnnnnnnnnnnnnnnnnnnnnnnnnnnnnnnnnnnnnnnnnnnnnnnnnnnnnnnnnnnnnnnnnnnnnnnnnnnnnnnnnnnnnnnnnnnnnnnnnnnnnnnnnnnnnnnnnnnnnnnnnnnnnnnnnnnnnnnnnnnnnnnnnnnnnnnnnnnnnnnnnnnnnnnnnnnnnnnnnnnnnnnnnnnnnnnnnnnnnnnnnnnnnnnnnnnnnnnnnnnnnnnnnnnnnnnnnnnnnnnnnnnnnnnnnnnnnnnnnnnnnnnnnnnnnnnnnnnnnnnnnnnnnnnnnnnnnnnnnnnnnnnnnnnnnnnnnnnnnnnnnnnnnnnnnnnnnnnnnnnnnnnnnnnnnnnnnnnnnnnnnnnnnnnnnnnnnnnnnnnnnnnnnnnnnnnnnnnnnnnnnnnnnnnnnnnnnnnnnnnnnnnnnnnnnnnnnnnnnnnnnnnnnnnnnnnnnnnnnnnnnnnnnnnnnnnnnnnnnnnnnnnnnnnnnnnnnnnnnnnnnnnnnnnnnnnnnnnnnnnnnnnnnnnnnnnnnnnnnnnnnnnnnnnnnnnnnnnnnnnnnnnnnnnnnnnnnnnnnnnnnnnnnnnnnnnnnnnnnnnnnnnnnnnnnnnnnnnnnnnnnnnnnnnnnnnnnnnnnnnnnnnnnnnnnnnnnnnnnnnnnnnnnnnnnnnnnnnnnnnnnnnnnnnnnnnnnnnnnnnnnnnnnnnnnnnnnnnnnnnnnnnnnnnnnnnnnnnnnnnnnnnnnnnnnnnnnnnnnnnnnnnnnnnnnnnnnnnnnnnnnnnnnnnnnnnnnnnnnnnnnnnnnnnnnnnnnnnnnnnnnnnnnnnnnnnnnnnnnnnnnnnnnnnnnnnnnnnnnnnnnnnnnnnnnnnnnnnnnnnnnnnnnnnnnnnnnnnnnnnnnnnnnnnnnnnnnnnnnnnnnnnnnnnnnnnnnnnnnnnnnnnnnnnnnnnnnnnnnnnnnnnnnnnnnnnnnnnnnnnnnnnnnnnnnnnnnnnnnnnnnnnnnnnnnnnnnnnnnnnnnnnnnnnnnnnnnnnnnnnnnnnnnnnnnnnnnnnnnnnnnnnnnnnnnnnnnnnnnnnnnnnnnnnnnnnnnnnnnnnnnnnnnnnnnnnnnnnnnnnnnnnnnnnnnnnnnnnnnnnnnnnnnnnnnnnnnnnnnnnnnnnnnnnnnnnnnnnnnnnnnnnnnnnnnnnnnnnnnnnnnnnnnnnnnnnnnnnnnnnnnnnnnnnnnnnnnnnnnnnnnnnnnnnnnnnnnnnnnnnnnnnnnnnnnnnnnnnnnnnnnnnnnnnnnnnnnnnnnnnnnnnnnnnnnnnnnnnnnnnnnnnnnnnnnnnnnnnnnnnnnnnnnnnnnnnnnnnnnnnnnnnnnnnnnnnnnnnnnnnnnnnnnnnnnnnnnnnnnnnnnnnnnnnnnnnnnnnnnnnnnnnnnnnnnnnnnnnnnnnnnnnnnnnnnnnnnnnnnnnnnnnnnnnnnnnnnnnnnnnnnnnnnnnnnnnnnnnnnnnnnnnnnnnnnnnnnnnnnnnnnnnnnnnnnnnnnnnnnnnnnnnnnnnnnnnnnnnnnnnnnnnnnnnnnnnnnnnnnnnnnnnnnnnnnnnnnnnnnnnnnnnnnnnnnnnnnnnnnnnnnnnnnnnnnnnnnnnnnnnnnnnnnnnnnnnnnnnnnnnnnnnnnnnnnnnnnnnnnnnnnnnnnnnnnnnnnnnnnnnnnnnnnnnnnnnnnnnnnnnnnnnnnnnnnnnnnnnnnnnnnnnnnnnnnnnnnnnnnnnnnnnnnnnnnnnnnnnnnnnnnnnnnnnnnnnnnnnnnnnnnnnnnnnnnnnnnnnnnnnnnnnnnnnnnnnnnnnnnnnnnnnnnnnnnnnnnnnnnnnnnnnnnnnnnnnnnnnnnnnnnnnnnnnnnnnnnnnnnnnnnnnnnnnnnnnnnnnnnnnnnnnnnnnnnnnnnnnnnnnnnnnnnnnnnnnnnnnnnnnnnnnnnnnnnnnnnnnnnnnnnnnnnnnnnnnnnnnnnnnnnnnnnnnnnnnnnnnnnnnnnnnnnnnnnnnnnnnnnnnnnnnnnnnnnnnnnnnnnnnnnnnnnnnnnnnnnnnnnnnnnnnnnnnnnnnnnnnnnnnnnnnnnnnnnnnnnnnnnnnnnnnnnnnnnnnnnnnnnnnnnnnnnnnnnnnnnnnnnnnnnnnnnnnnnnnnnnnnnnnnnnnnnnnnnnnnnnnnnnnnnnnnnnnnnnnnnnnnnnnnnnnnnnnnnnnnnnnnnnnnnnnnnnnnnnnnnnnnnnnnnnnnnnnnnnnnnnnnnnnnnnnnnnnnnnnnnnnnnnnnnnnnnnnnnnnnnnnnnnnnnnnnnnnnnnnnnnnnnnnnnnnnnnnnnnnnnnnnnnnnnnnnnnnnnnnnnnnnnnnnnnnnnnnnnnnnnnnnnnnnnnnnnnnnnnnnnnnnnnnnnnnnnnnnnnnnnnnnnnnnnnnnnnnnnnnnnnnnnnnnnnnnnnnnnnnnnnnnnnnnnnnnnnnnnnnnnnnnnnnnnnnnnnnnnnnnnnnnnnnnnnnnnnnnnnnnnnnnnnnnnnnnnnnnnnnnnnnnnnnnnnnnnnnnnnnnnnnnnnnnnnnnnnnnnnnnnnnnnnnnnnnnnnnnnnnnnnnnnnnnnnnnnnnnnnnnnnnnnnnnnnnnnnnnnnnnnnnnnnnnnnnnnnnnnnnnnnnnnnnnnnnnnnnnnnnnnnnnnnnnnnnnnnnnnnnnnnnnnnnnnnnnnnnnnnnnnnnnnnnnnnnnnnnnnnnnnnnnnnnnnnnnnnnnnnnnnnnnnnnnnnnnnnnnnnnnnnnnnnnnnnnnnnnnnnnnnnnnnnnnnnnnnnnnnnnnnnnnnnnnnnnnnnnnnnnnnnnnnnnnnnnnnnnnnnnnnnnnnnnnnnnnnnnnnnnnnnnnnnnnnnnnnnnnnnnnnnnnnnnnnnnnnnnnnnnnnnnnnnnnnnnnnnnnnnnnnnnnnnnnnnnnnnnnnnnnnnnnnnnnnnnnnnnnnnnnnnnnnnnnnnnnnnnnnnnnnnnnnnnnnnnnnnnnnnnnnnnnnnnnnnnnnnnnnnnnnnnnnnnnnnnnnnnnnnnnnnnnnnnnnnnnnnnnnnnnnnnnnnnnnnnnnnnnnnnnnnnnnnnnnnnnnnnnnnnnnnnnnnnnnnnnnnnnnnnnnnnnnnnnnnnnnnnnnnnnnnnnnnnnnnnnnnnnnnnnnnnnnnnnnnnnnnnnnnnnnnnnnnnnnnnnnnnnnnnnnnnnnnnnnnnnnnnnnnnnnnnnnnnnnnnnnnnnnnnnnnnnnnnnnnnnnnnnnnnnnnnnnnnnnnnnnnnnnnnnnnnnnnnnnnnnnnnnnnnnnnnnnnnnnnnnnnnnnnnnnnnnnnnnnnnnnnnnnnnnnnnnnnnnnnnnnnnnnnnnnnnnnnnnnnnnnnnnnnnnnnnnnnnnnnnnnnnnnnnnnnnnnnnnnnnnnnnnnnnnnnnnnnnnnnnnnnnnnnnnnnnnnnnnnnnnnnnnnnnnnnnnnnnnnnnnnnnnnnnnnnnnnnnnnnnnnnnnnnnnnnnnnnnnnnnnnnnnnnnnnnnnnnnnnnnnnnnnnnnnnnnnnnnnnnnnnnnnnnnnnnnnnnnnnnnnnnnnnnnnnnnnnnnnnnnnnnnnnnnnnnnnnnnnnnnnnnnnnnnnnnnnnnnnnnnnnnnnnnnnnnnnnnnnnnnnnnnnnnnnnnnnnnnnnnnnnnnnnnnnnnnnnnnnnnnnnnnnnnnnnnnnnnnnnnnnnnnnnnnnnnnnnnnnnnnnnnnnnnnnnnnnnnnnnnnnnnnnnnnnnnnnnnnnnnnnnnnnnnnnnnnnnnnnnnnnnnnnnnnnnnnnnnnnnnnnnnnnnnnnnnnnnnnnnnnnnnnnnnnnnnnnnnnnnnnnnnnnnnnnnnnnnnnnnnnnnnnnnnnnnnnnnnnnnnnnnnnnnnnnnnnnnnnnnnnnnnnnnnnnnnnnnnnnnnnnnnnnnnnnnnnnnnnnnnnnnnnnnnnnnnnnnnnnnnnnnnnnnnnnnnnnnnnnnnnnnnnnnnnnnnnnnnnnnnnnnnnnnnnnnnnnnnnnnnnnnnnnnnnnnnnnnnnnnnnnnnnnnnnnnnnnnnnnnnnnnnnnnnnnnnnnnnnnnnnnnnnnnnnnnnnnnnnnnnnnnnnnnnnnnnnnnnnnnnnnnnnnnnnnnnnnnnnnnnnnnnnnnnnnnnnnnnnnnnnnnnnnnnnnnnnnnnnnnnnnnnnnnnnnnnnnnnnnnnnnnnnnnnnnnnnnnnnnnnnnnnnnnnnnnnnnnnnnnnnnnnnnnnnnnnnnnnnnnnnnnnnnnnnnnnnnnnnnnnnnnnnnnnnnnnnnnnnnnnnnnnnnnnnnnnnnnnnnnnnnnnnnnnnnnnnnnnnnnnnnnnnnnnnnnnnnnnnnnnnnnnnnnnnnnnnnnnnnnnnnnnnnnnnnnnnnnnnnnnnnnnnnnnnnnnnnnnnnnnnnnnnnnnnnnnnnnnnnnnnnnnnnnnnnnnnnnnnnnnnnnnnnnnnnnnnnnnnnnnnnnnnnnnnnnnnnnnnnnnnnnnnnnnnnnnnnnnnnnnnnnnnnnnnnnnnnnnnnnnnnnnnnnnnnnnnnnnnnnnnnnnnnnnnnnnnnnnnnnnnnnnnnnnnnnnnnnnnnnnnnnnnnnnnnnnnnnnnnnnnnnnnnnnnnnnnnnnnnnnnnnnnnnnnnnnnnnnnnnnnnnnnnnnnnnnnnnnnnnnnnnnnnnnnnnnnnnnnnnnnnnnnnnnnnnnnnnnnnnnnnnnnnnnnnnnnnnnnnnnnnnnnnnnnnnnnnnnnnnnnnnnnnnnnnnnnnnnnnnnnnnnnnnnnnnnnnnnnnnnnnnnnnnnnnnnnnnnnnnnnnnnnnnnnnnnnnnnnnnnnnnnnnnnnnnnnnnnnnnnnnnnnnnnnnnnnnnnnnnnnnnnnnnnnnnnnnnnnnnnnnnnnnnnnnnnnnnnnnnnnnnnnnnnnnnnnnnnnnnnnnnnnnnnnnnnnnnnnnnnnnnnnnnnnnnnnnnnnnnnnnnnnnnnnnnnnnnnnnnnnnnnnnnnnnnnnnnnnnnnnnnnnnnnnnnnnnnnnnnnnnnnnnnnnnnnnnnnnnnnnnnnnnnnnnnnnnnnnnnnnnnnnnnnnnnnnnnnnnnnnnnnnnnnnnnnnnnnnnnnnnnnnnnnnnnnnnnnnnnnnnnnnnnnnnnnnnnnnnnnnnnnnnnnnnnnnnnnnnnnnnnnnnnnnnnnnnnnnnnnnnnnnnnnnnnnnnnnnnnnnnnnnnnnnnnnnnnnnnnnnnnnnnnnnnnnnnnnnnnnnnnnnnnnnnnnnnnnnnnnnnnnnnnnnnnnnnnnnnnnnnnnnnnnnnnnnnnnnnnnnnnnnnnnnnnnnnnnnnnnnnnnnnnnnnnnnnnnnnnnnnnnnnnnnnnnnnnnnnnnnnnnnnnnnnnnnnnnnnnnnnnnnnnnnnnnnnnnnnnnnnnnnnnnnnnnnnnnnnnnnnnnnnnnnnnnnnnnnnnnnnnnnnnnnnnnnnnnnnnnnnnnnnnnnnnnnnnnnnnnnnnnnnnnnnnnnnnnnnnnnnnnnnnnnnnnnnnnnnnnnnnnnnnnnnnnnnnnnnnnnnnnnnnnnnnnnnnnnnnnnnnnnnnnnnnnnnnnnnnnnnnnnnnnnnnnnnnnnnnnnnnnnnnnnnnnnnnnnnnnnnnnnnnnnnnnnnnnnnnnnnnnnnnnnnnnnnnnnnnnnnnnnnnnnnnnnnnnnnnnnnnnnnnnnnnnnnnnnnnnnnnnnnnnnnnnnnnnnnnnnnnnnnnnnnnnnnnnnnnnnnnnnnnnnnnnnnnnnnnnnnnnnnnnnnnnnnnnnnnnnnnnnnnnnnnnnnnnnnnnnnnnnnnnnnnnnnnnnnnnnnnnnnnnnnnnnnnnnnnnnnnnnnnnnnnnnnnnnnnnnnnnnnnnnnnnnnnnnnnnnnnnnnnnnnnnnnnnnnnnnnnnnnnnnnnnnnnnnnnnnnnnnnnnnnnnnnnnnnnnnnnnnnnnnnnnnnnnnnnnnnnnnnnnnnnnnnnnnnnnnnnnnnnnnnnnnnnnnnnnnnnnnnnnnnnnnnnnnnnnnnnnnnnnnnnnnnnnnnnnnnnnnnnnnnnnnnnnnnnnnnnnnnnnnnnnnnnnnnnnnnnnnnnnnnnnnnnnnnnnnnnnnnnnnnnnnnnnnnnnnnnnnnnnnnnnnnnnnnnnnnnnnnnnnnnnnnnnnnnnnnnnnnnnnnnnnnnnnnnnnnnnnnnnnnnnnnnnnnnnnnnnnnnnnnnnnnnnnnnnnnnnnnnnnnnnnnnnnnnnnnnnnnnnnnnnnnnnnnnnnnnnnnnnnnnnnnnnnnnnnnnnnnnnnnnnnnnnnnnnnnnnnnnnnnnnnnnnnnnnnnnnnnnnnnnnnnnnnnnnnnnnnnnnnnnnnnnnnnnnnnnnnnnnnnnnnnnnnnnnnnnnnnnnnnnnnnnnnnnnnnnnnnnnnnnnnnnnnnnnnnnnnnnnnnnnnnnnnnnnnnnnnnnnnnnnnnnnnnnnnnnnnnnnnnnnnnnnnnnnnnnnnnnnnnnnnnnnnnnnnnnnnnnnnnnnnnnnnnnnnnnnnnnnnnnnnnnnnnnnnnnnnnnnnnnnnnnnnnnnnnnnnnnnnnnnnnnnnnnnnnnnnnnnnnnnnnnnnnnnnnnnnnnnnnnnnnnnnnnnnnnnnnnnnnnnnnnnnnnnnnnnnnnnnnnnnnnnnnnnnnnnnnnnnnnnnnnnnnnnnnnnnnnnnnnnnnnnnnnnnnnnnnnnnnnnnnnnnnnnnnnnnnnnnnnnnnnnnnnnnnnnnnnnnnnnnnnnnnnnnnnnnnnnnnnnnnnnnnnnnnnnnnnnnnnnnnnnnnnnnnnnnnnnnnnnnnnnnnnnnnnnnnnnnnnnnnnnnnnnnnnnnnnnnnnnnnnnnnnnnnnnnnnnnnnnnnnnnnnnnnnnnnnnnnnnnnnnnnnnnnnnnnnnnnnnnnnnnnnnnnnnnnnnnnnnnnnnnnnnnnnnnnnnnnnnnnnnnnnnnnnnnnnnnnnnnnnnnnnnnnnnnnnnnnnnnnnnnnnnnnnnnnnnnnnnnnnnnnnnnnnnnnnnnnnnnnnnnnnnnnnnnnnnnnnnnnnnnnnnnnnnnnnnnnnnnnnnnnnnnnnnnnnnnnnnnnnnnnnnnnnnnnnnnnnnnnnnnnnnnnnnnnnnnnnnnnnnnnnnnnnnnnnnnnnnnnnnnnnnnnnnnnnnnnnnnnnnnnnnnnnnnnnnnnnnnnnnnnnnnnnnnnnnnnnnnnnnnnnnnnnnnnnnnnnnnnnnnnnnnnnnnnnnnnnnnnnnnnnnnnnnnnnnnnnnnnnnnnnnnnnnnnnnnnnnnnnnnnnnnnnnnnnnnnnnnnnnnnnnnnnnnnnnnnnnnnnnnnnnnnnnnnnnnnnnnnnnnnnnnnnnnnnnnnnnnnnnnnnnnnnnnnnnnnnnnnnnnnnnnnnnnnnnnnnnnnnnnnnnnnnnnnnnnnnnnnnnnnnnnnnnnnnnnnnnnnnnnnnnnnnnnnnnnnnnnnnnnnnnnnnnnnnnnnnnnnnnnnnnnnnnnnnnnnnnnnnnnnnnnnnnnnnnnnnnnnnnnnnnnnnnnnnnnnnnnnnnnnnnnnnnnnnnnnnnnnnnnnnnnnnnnnnnnnnnnnnnnnnnnnnnnnnnnnnnnnnnnnnnnnnnnnnnnnnnnnnnnnnnnnnnnnnnnnnnnnnnnnnnnnnnnnnnnnnnnnnnnnnnnnnnnnnnnnnnnnnnnnnnnnnnnnnnnnnnnnnnnnnnnnnnnnnnnnnnnnnnnnnnnnnnnnnnnnnnnnnnnnnnnnnnnnnnnnnnnnnnnnnnnnnnnnnnnnnnnnnnnnnnnnnnnnnnnnnnnnnnnnnnnnnnnnnnnnnnnnnnnnnnnnnnnnnnnnnnnnnnnnnnnnnnnnnnnnnnnnnnnnnnnnnnnnnnnnnnnnnnnnnnnnnnnnnnnnnnnnnnnnnnnnnnnnnnnnnnnnnnnnnnnnnnnnnnnnnnnnnnnnnnnnnnnnnnnnnnnnnnnnnnnnnnnnnnnnnnnnnnnnnnnnnnnnnnnnnnnnnnnnnnnnnnnnnnnnnnnnnnnnnnnnnnnnnnnnnnnnnnnnnnnnnnnnnnnnnnnnnnnnnnnnnnnnnnnnnnnnnnnnnnnnnnnnnnnnnnnnnnnnnnnnnnnnnnnnnnnnnnnnnnnnnnnnnnnnnnnnnnnnnnnnnnnnnnnnnnnnnnnnnnnnnnnnnnnnnnnnnnnnnnnnnnnnnnnnnnnnnnnnnnnnnnnnnnnnnnnnnnnnnnnnnnnnnnnnnnnnnnnnnnnnnnnnnnnnnnnnnnnnnnnnnnnnnnnnnnnnnnnnnnnnnnnnnnnnnnnnnnnnnnnnnnnnnnnnnnnnnnnnnnnnnnnnnnnnnnnnnnnnnnnnnnnnnnnnnnnnnnnnnnnnnnnnnnnnnnnnnnnnnnnnnnnnnnnnnnnnnnnnnnnnnnnnnnnnnnnnnnnnnnnnnnnnnnnnnnnnnnnnnnnnnnnnnnnnnnnnnnnnnnnnnnnnnnnnnnnnnnnnnnnnnnnnnnnnnnnnnnnnnnnnnnnnnnnnnnnnnnnnnnnnnnnnnnnnnnnnnnnnnnnnnnnnnnnnnnnnnnnnnnnnnnnnnnnnnnnnnnnnnnnnnnnnnnnnnnnnnnnnnnnnnnnnnnnnnnnnnnnnnnnnnnnnnnnnnnnnnnnnnnnnnnnnnnnnnnnnnnnnnnnnnnnnnnnnnnnnnnnnnnnnnnnnnnnnnnnnnnnnnnnnnnnnnnnnnnnnnnnnnnnnnnnnnnnnnnnnnnnnnnnnnnnnnnnnnnnnnnnnnnnnnnnnnnnnnnnnnnnnnnnnnnnnnnnnnnnnnnnnnnnnnnnnnnnnnnnnnnnnnnnnnnnnnnnnnnnnnnnnnnnnnnnnnnnnnnnnnnnnnnnnnnnnnnnnnnnnnnnnnnnnnnnnnnnnnnnnnnnnnnnnnnnnnnnnnnnnnnnnnnnnnnnnnnnnnnnnnnnnnnnnnnnnnnnnnnnnnnnnnnnnnnnnnnnnnnnnnnnnnnnnnnnnnnnnnnnnnnnnnnnnnnnnnnnnnnnnnnnnnnnnnnnnnnnnnnnnnnnnnnnnnnnnnnnnnnnnnnnnnnnnnnnnnnnnnnnnnnnnnnnnnnnnnnnnnnnnnnnnnnnnnnnnnnnnnnnnnnnnnnnnnnnnnnnnnnnnnnnnnnnnnnnnnnnnnnnnnnnnnnnnnnnnnnnnnnnnnnnnnnnnnnnnnnnnnnnnnnnnnnnnnnnnnnnnnnnnnnnnnnnnnnnnnnnnnnnnnnnnnnnnnnnnnnnnnnnnnnnnnnnnnnnnnnnnnnnnnnnnnnnnnnnnnnnnnnnnnnnnnnnnnnnnnnnnnnnnnnnnnnnnnnnnnnnnnnnnnnnnnnnnnnnnnnnnnnnnnnnnnnnnnnnnnnnnnnnnnnnnnnnnnnnnnnnnnnnnnnnnnnnnnnnnnnnnnnnnnnnnnnnnnnnnnnnnnnnnnnnnnnnnnnnnnnnnnnnnnnnnnnnnnnnnnnnnnnnnnnnnnnnnnnnnnnnnnnnnnnnnnnnnnnnnnnnnnnnnnnnnnnnnnnnnnnnnnnnnnnnnnnnnnnnnnnnnnnnnnnnnnnnnnnnnnnnnnnnnnnnnnnnnnnnnnnnnnnnnnnnnnnnnnnnnnnnnnnnnnnnnnnnnnnnnnnnnnnnnnnnnnnnnnnnnnnnnnnnnnnnnnnnnnnnnnnnnnnnnnnnnnnnnnnnnnnnnnnnnnnnnnnnnnnnnnnnnnnnnnnnnnnnnnnnnnnnnnnnnnnnnnnnnnnnnnnnnnnnnnnnnnnnnnnnnnnnnnnnnnnnnnnnnnnnnnnnnnnnnnnnnnnnnnnnnnnnnnnnnnnnnnnnnnnnnnnnnnnnnnnnnnnnnnnnnnnnnnnnnnnnnnnnnnnnnnnnnnnnnnnnnnnnnnnnnnnnnnnnnnnnnnnnnnnnnnnnnnnnnnnnnnnnnnnnnnnnnnnnnnnnnnnnnnnnnnnnnnnnnnnnnnnnnnnnnnnnnnnnnnnnnnnnnnnnnnnnnnnnnnnnnnnnnnnnnnnnnnnnnnnnnnnnnnnnnnnnnnnnnnnnnnnnnnnnnnnnnnnnnnnnnnnnnnnnnnnnnnnnnnnnnnnnnnnnnnnnnnnnnnnnnnnnnnnnnnnnnnnnnnnnnnnnnnnnnnnnnnnnnnnnnnnnnnnnnnnnnnnnnnnnnnnnnnnnnnnnnnnnnnnnnnnnnnnnnnnnnnnnnnnnnnnnnnnnnnnnnnnnnnnnnnnnnnnnnnnnnnnnnnnnnnnnnnnnnnnnnnnnnnnnnnnnnnnnnnnnnnnnnnnnnnnnnnnnnnnnnnnnnnnnnnnnnnnnnnnnnnnnnnnnnnnnnnnnnnnnnnnnnnnnnnnnnnnnnnnnnnnnnnnnnnnnnnnnnnnnnnnnnnnnnnnnnnnnnnnnnnnnnnnnnnnnnnnnnnnnnnnnnnnnnnnnnnnnnnnnnnnnnnnnnnnnnnnnnnnnnnnnnnnnnnnnnnnnnnnnnnnnnnnnnnnnnnnnnnnnnnnnnnnnnnnnnnnnnnnnnnnnnnnnnnnnnnnnnnnnnnnnnnnnnnnnnnnnnnnnnnnnnnnnnnnnnnnnnnnnnnnnnnnnnnnnnnnnnnnnnnnnnnnnnnnnnnnnnnnnnnnnnnnnnnnnnnnnnnnnnnnnnnnnnnnnnnnnnnnnnnnnnnnnnnnnnnnnnnnnnnnnnnnnnnnnnnnnnnnnnnnnnnnnnnnnnnnnnnnnnnnnnnnnnnnnnnnnnnnnnnnnnnnnnnnnnnnnnnnnnnnnnnnnnnnnnnnnnnnnnnnnnnnnnnnnnnnnnnnnnnnnnnnnnnnnnnnnnnnnnnnnnnnnnnnnnnnnnnnnnnnnnnnnnnnnnnnnnnnnnnnnnnnnnnnnnnnnnnnnnnnnnnnnnnnnnnnnnnnnnnnnnnnnnnnnnnnnnnnnnnnnnnnnnnnnnnnnnnnnnnnnnnnnnnnnnnnnnnnnnnnnnnnnnnnnnnnnnnnnnnnnnnnnnnnnnnnnnnnnnnnnnnnnnnnnnnnnnnnnnnnnnnnnnnnnnnnnnnnnnnnnnnnnnnnnnnnnnnnnnnnnnnnnnnnnnnnnnnnnnnnnnnnnnnnnnnnnnnnnnnnnnnnnnnnnnnnnnnnnnnnnnnnnnnnnnnnnnnnnnnnnnnnnnnnnnnnnnnnnnnnnnnnnnnnnnnnnnnnnnnnnnnnnnnnnnnnnnnnnnnnnnnnnnnnnnnnnnnnnnnnnnnnnnnnnnnnnnnnnnnnnnnnnnnnnnnnnnnnnnnnnnnnnnnnnnnnnnnnnnnnnnnnnnnnnnnnnnnnnnnnnnnnnnnnnnnnnnnnnnnnnnnnnnnnnnnnnnnnnnnnnnnnnnnnnnnnnnnnnnnnnnnnnnnnnnnnnnnnnnnnnnnnnnnnnnnnnnnnnnnnnnnnnnnnnnnnnnnnnnnnnnnnnnnnnnnnnnnnnnnnnnnnnnnnnnnnnnnnnnnnnnnnnnnnnnnnnnnnnnnnnnnnnnnnnnnnnnnnnnnnnnnnnnnnnnnnnnnnnnnnnnnnnnnnnnnnnnnnnnnnnnnnnnnnnnnnnnnnnnnnnnnnnnnnnnnnnnnnnnnnnnnnnnnnnnnnnnnnnnnnnnnnnnnnnnnnnnnnnnnnnnnnnnnnnnnnnnnnnnnnnnnnnnnnnnnnnnnnnnnnnnnnnnnnnnnnnnnnnnnnnnnnnnnnnnnnnnnnnnnnnnnnnnnnnnnnnnnnnnnnnnnnnnnnnnnnnnnnnnnnnnnnnnnnnnnnnnnnnnnnnnnnnnnnnnnnnnnnnnnnnnnnnnnnnnnnnnnnnnnnnnnnnnnnnnnnnnnnnnnnnnnnnnnnnnnnnnnnnnnnnnnnnnnnnnnnnnnnnnnnnnnnnnnnnnnnnnnnnnnnnnnnnnnnnnnnnnnnnnnnnnnnnnnnnnnnnnnnnnnnnnnnnnnnnnnnnnnnnnnnnnnnnnnnnnnnnnnnnnnnnnnnnnnnnnnnnnnnnnnnnnnnnnnnnnnnnnnnnnnnnnnnnnnnnnnnnnnnnnnnnnnnnnnnnnnnnnnnnnnnnnnnnnnnnnnnnnnnnnnnnnnnnnnnnnnnnnnnnnnnnnnnnnnnnnnnnnnnnnnnnnnnnnnnnnnnnnnnnnnnnnnnnnnnnnnnnnnnnnnnnnnnnnnnnnnnnnnnnnnnnnnnnnnnnnnnnnnnnnnnnnnnnnnnnnnnnnnnnnnnnnnnnnnnnnnnnnnnnnnnnnnnnnnnnnnnnnnnnnnnnnnnnnnnnnnnnnnnnnnnnnnnnnnnnnnnnnnnnnnnnnnnnnnnnnnnnnnnnnnnnnnnnnnnnnnnnnnnnnnnnnnnnnnnnnnnnnnnnnnnnnnnnnnnnnnnnnnnnnnnnnnnnnnnnnnnnnnnnnnnnnnnnnnnnnnnnnnnnnnnnnnnnnnnnnnnnnnnnnnnnnnnnnnnnnnnnnnnnnnnnnnnnnnnnnnnnnnnnnnnnnnnnnnnnnnnnnnnnnnnnnnnnnnnnnnnnnnnnnnnnnnnnnnnnnnnnnnnnnnnnnnnnnnnnnnnnnnnnnnnnnnnnnnnnnnnnnnnnnnnnnnnnnnnnnnnnnnnnnnnnnnnnnnnnnnnnnnnnnnnnnnnnnnnnnnnnnnnnnnnnnnnnnnnnnnnnnnnnnnnnnnnnnnnnnnnnnnnnnnnnnnnnnnnnnnnnnnnnnnnnnnnnnnnnnnnnnnnnnnnnnnnnnnnnnnnnnnnnnnnnnnnnnnnnnnnnnnnnnnnnnnnnnnnnnnnnnnnnnnnnnnnnnnnnnnnnnnnnnnnnnnnnnnnnnnnnnnnnnnnnnnnnnnnnnnnnnnnnnnnnnnnnnnnnnnnnnnnnnnnnnnnnnnnnnnnnnnnnnnnnnnnnnnnnnnnnnnnnnnnnnnnnnnnnnnnnnnnnnnnnnnnnnnnnnnnnnnnnnnnnnnnnnnnnnnnnnnnnnnnnnnnnnnnnnnnnnnnnnnnnnnnnnnnnnnnnnnnnnnnnnnnnnnnnnnnnnnnnnnnnnnnnnnnnnnnnnnnnnnnnnnnnnnnnnnnnnnnnnnnnnnnnnnnnnnnnnnnnnnnnnnnnnnnnnnnnnnnnnnnnnnnnnnnnnnnnnnnnnnnnnnnnnnnnnnnnnnnnnnnnnnnnnnnnnnnnnnnnnnnnnnnnnnnnnnnnnnnnnnnnnnnnnnnnnnnnnnnnnnnnnnnnnnnnnnnnnnnnnnnnnnnnnnnnnnnnnnnnnnnnnnnnnnnnnnnnnnnnnnnnnnnnnnnnnnnnnnnnnnnnnnnnnnnnnnnnnnnnnnnnnnnnnnnnnnnnnnnnnnnnnnnnnnnnnnnnnnnnnnnnnnnnnnnnnnnnnnnnnnnnnnnnnnnnnnnnnnnnnnnnnnnnnnnnnnnnnnnnnnnnnnnnnnnnnnnnnnnnnnnnnnnnnnnnnnnnnnnnnnnnnnnnnnnnnnnnnnnnnnnnnnnnnnnnnnnnnnnnnnnnnnnnnnnnnnnnnnnnnnnnnnnnnnnnnnnnnnnnnnnnnnnnnnnnnnnnnnnnnnnnnnnnnnnnnnnnnnnnnnnnnnnnnnnnnnnnnnnnnnnnnnnnnnnnnnnnnnnnnnnnnnnnnnnnnnnnnnnnnnnnnnnnnnnnnnnnnnnnnnnnnnnnnnnnnnnnnnnnnnnnnnnnnnnnnnnnnnnnnnnnnnnnnnnnnnnnnnnnnnnnnnnnnnnnnnnnnnnnnnnnnnnnnnnnnnnnnnnnnnnnnnnnnnnnnnnnnnnnnnnnnnnnnnnnnnnnnnnnnnnnnnnnnnnnnnnnnnnnnnnnnnnnnnnnnnnnnnnnnnnnnnnnnnnnnnnnnnnnnnnnnnnnnnnnnnnnnnnnnnnnnnnnnnnnnnnnnnnnnnnnnnnnnnnnnnnnnnnnnnnnnnnnnnnnnnnnnnnnnnnnnnnnnnnnnnnnnnnnnnnnnnnnnnnnnnnnnnnnnnnnnnnnnnnnnnnnnnnnnnnnnnnnnnnnnnnnnnnnnnnnnnnnnnnnnnnnnnnnnnnnnnnnnnnnnnnnnnnnnnnnnnnnnnnnnnnnnnnnnnnnnnnnnnnnnnnnnnnnnnnnnnnnnnnnnnnnnnnnnnnnnnnnnnnnnnnnnnnnnnnnnnnnnnnnnnnnnnnnnnnnnnnnnnnnnnnnnnnnnnnnnnnnnnnnnnnnnnnnnnnnnnnnnnnnnnnnnnnnnnnnnnnnnnnnnnnnnnnnnnnnnnnnnnnnnnnnnnnnnnnnnnnnnnnnnnnnnnnnnnnnnnnnnnnnnnnnnnnnnnnnnnnnnnnnnnnnnnnnnnnnnnnnnnnnnnnnnnnnnnnnnnnnnnnnnnnnnnnnnnnnnnnnnnnnnnnnnnnnnnnnnnnnnnnnnnnnnnnnnnnnnnnnnnnnnnnnnnnnnnnnnnnnnnnnnnnnnnnnnnnnnnnnnnnnnnnnnnnnnnnnnnnnnnnnnnnnnnnnnnnnnnnnnnnnnnnnnnnnnnnnnnnnnnnnnnnnnnnnnnnnnnnnnnnnnnnnnnnnnnnnnnnnnnnnnnnnnnnnnnnnnnnnnnnnnnnnnnnnnnnnnnnnnnnnnnnnnnnnnnnnnnnnnnnnnnnnnnnnnnnnnnnnnnnnnnnnnnnnnnnnnnnnnnnnnnnnnnnnnnnnnnnnnnnnnnnnnnnnnnnnnnnnnnnnnnnnnnnnnnnnnnnnnnnnnnnnnnnnnnnnnnnnnnnnnnnnnnnnnnnnnnnnnnnnnnnnnnnnnnnnnnnnnnnnnnnnnnnnnnnnnnnnnnnnnnnnnnnnnnnnnnnnnnnnnnnnnnnnnnnnnnnnnnnnnnnnnnnnnnnnnnnnnnnnnnnnnnnnnnnnnnnnnnnnnnnnnnnnnnnnnnnnnnnnnnnnnnnnnnnnnnnnnnnnnnnnnnnnnnnnnnnnnnnnnnnnnnnnnnnnnnnnnnnnnnnnnnnnnnnnnnnnnnnnnnnnnnnnnnnnnnnnnnnnnnnnnnnnnnnnnnnnnnnnnnnnnnnnnnnnnnnnnnnnnnnnnnnnnnnnnnnnnnnnnnnnnnnnnnnnnnnnnnnnnnnnnnnnnnnnnnnnnnnnnnnnnnnnnnnnnnnnnnnnnnnnnnnnnnnnnnnnnnnnnnnnnnnnnnnnnnnnnnnnnnnnnnnnnnnnnnnnnnnnnnnnnnnnnnnnnnnnnnnnnnnnnnnnnnnnnnnnnnnnnnnnnnnnnnnnnnnnnnnnnnnnnnnnnnnnnnnnnnnnnnnnnnnnnnnnnnnnnnnnnnnnnnnnnnnnnnnnnnnnnnnnnnnnnnnnnnnnnnnnnnnnnnnnnnnnnnnnnnnnnnnnnnnnnnnnnnnnnnnnnnnnnnnnnnnnnnnnnnnnnnnnnnnnnnnnnnnnnnnnnnnnnnnnnnnnnnnnnnnnnnnnnnnnnnnnnnnnnnnnnnnnnnnnnnnnnnnnnnnnnnnnnnnnnnnnnnnnnnnnnnnnnnnnnnnnnnnnnnnnnnnnnnnnnnnnnnnnnnnnnnnnnnnnnnnnnnnnnnnnnnnnnnnnnnnnnnnnnnnnnnnnnnnnnnnnnnnnnnnnnnnnnnnnnnnnnnnnnnnnnnnnnnnnnnnnnnnnnnnnnnnnnnnnnnnnnnnnnnnnnnnnnnnnnnnnnnnnnnnnnnnnnnnnnnnnnnnnnnnnnnnnnnnnnnnnnnnnnnnnnnnnnnnnnnnnnnnnnnnnnnnnnnnnnnnnnnnnnnnnnnnnnnnnnnnnnnnnnnnnnnnnnnnnnnnnnnnnnnnnnnnnnnnnnnnnnnnnnnnnnnnnnnnnnnnnnnnnnnnnnnnnnnnnnnnnnnnnnnnnnnnnnnnnnnnnnnnnnnnnnnnnnnnnnnnnnnnnnnnnnnnnnnnnnnnnnnnnnnnnnnnnnnnnnnnnnnnnnnnnnnnnnnnnnnnnnnnnnnnnnnnnnnnnnnnnnnnnnnnnnnnnnnnnnnnnnnnnnnnnnnnnnnnnnnnnnnnnnnnnnnnnnnnnnnnnnnnnnnnnnnnnnnnnnnnnnnnnnnnnnnnnnnnnnnnnnnnnnnnnnnnnnnnnnnnnnnnnnnnnnnnnnnnnnnnnnnnnnnnnnnnnnnnnnnnnnnnnnnnnnnnnnnnnnnnnnnnnnnnnnnnnnnnnnnnnnnnnnnnnnnnnnnnnnnnnnnnnnnnnnnnnnnnnnnnnnnnnnnnnnnnnnnnnnnnnnnnnnnnnnnnnnnnnnnnnnnnnnnnnnnnnnnnnnnnnnnnnnnnnnnnnnnnnnnnnnnnnnnnnnnnnnnnnnnnnnnnnnnnnnnnnnnnnnnnnnnnnnnnnnnnnnnnnnnnnnnnnnnnnnnnnnnnnnnnnnnnnnnnnnnnnnnnnnnnnnnnnnnnnnnnnnnnnnnnnnnnnnnnnnnnnnnnnnnnnnnnnnnnnnnnnnnnnnnnnnnnnnnnnnnnnnnnnnnnnnnnnnnnnnnnnnnnnnnnnnnnnnnnnnnnnnnnnnnnnnnnnnnnnnnnnnnnnnnnnnnnnnnnnnnnnnnnnnnnnnnnnnnnnnnnnnnnnnnnnnnnnnnnnnnnnnnnnnnnnnnnnnnnnnnnnnnnnnnnnnnnnnnnnnnnnnnnnnnnnnnnnnnnnnnnnnnnnnnnnnnnnnnnnnnnnnnnnnnnnnnnnnnnnnnnnnnnnnnnnnnnnnnnnnnnnnnnnnnnnnnnnnnnnnnnnnnnnnnnnnnnnnnnnnnnnnnnnnnnnnnnnnnnnnnnnnnnnnnnnnnnnnnnnnnnnnnnnnnnnnnnnnnnnnnnnnnnnnnnnnnnnnnnnnnnnnnnnnnnnnnnnnnnnnnnnnnnnnnnnnnnnnnnnnnnnnnnnnnnnnnnnnnnnnnnnnnnnnnnnnnnnnnnnnnnnnnnnnnnnnnnnnnnnnnnnnnnnnnnnnnnnnnnnnnnnnnnnnnnnnnnnnnnnnnnnnnnnnnnnnnnnnnnnnnnnnnnnnnnnnnnnnnnnnnnnnnnnnnnnnnnnnnnnnnnnnnnnnnnnnnnnnnnnnnnnnnnnnnnnnnnnnnnnnnnnnnnnnnnnnnnnnnnnnnnnnnnnnnnnnnnnnnnnnnnnnnnnnnnnnnnnnnnnnnnnnnnnnnnnnnnnnnnnnnnnnnnnnnnnnnnnnnnnnnnnnnnnnnnnnnnnnnnnnnnnnnnnnnnnnnnnnnnnnnnnnnnnnnnnnnnnnnnnnnnnnnnnnnnnnnnnnnnnnnnnnnnnnnnnnnnnnnnnnnnnnnnnnnnnnnnnnnnnnnnnnnnnnnnnnnnnnnnnnnnnnnnnnnnnnnnnnnnnnnnnnnnnnnnnnnnnnnnnnnnnnnnnnnnnnnnnnnnnnnnnnnnnnnnnnnnnnnnnnnnnnnnnnnnnnnnnnnnnnnnnnnnnnnnnnnnnnnnnnnnnnnnnnnnnnnnnnnnnnnnnnnnnnnnnnnnnnnnnnnnnnnnnnnnnnnnnnnnnnnnnnnnnnnnnnnnnnnnnnnnnnnnnnnnnnnnnnnnnnnnnnnnnnnnnnnnnnnnnnnnnnnnnnnnnnnnnnnnnnnnnnnnnnnnnnnnnnnnnnnnnnnnnnnnnnnnnnnnnnnnnnnnnnnnnnnnnnnnnnnnnnnnnnnnnnnnnnnnnnnnnnnnnnnnnnnnnnnnnnnnnnnnnnnnnnnnnnnnnnnnnnnnnnnnnnnnnnnnnnnnnnnnnnnnnnnnnnnnnnnnnnnnnnnnnnnnnnnnnnnnnnnnnnnnnnnnnnnnnnnnnnnnnnnnnnnnnnnnnnnnnnnnnnnnnnnnnnnnnnnnnnnnnnnnnnnnnnnnnnnnnnnnnnnnnnnnnnnnnnnnnnnnnnnnnnnnnnnnnnnnnnnnnnnnnnnnnnnnnnnnnnnnnnnnnnnnnnnnnnnnnnnnnnnnnnnnnnnnnnnnnnnnnnnnnnnnnnnnnnnnnnnnnnnnnnnnnnnnnnnnnnnnnnnnnnnnnnnnnnnnnnnnnnnnnnnnnnnnnnnnnnnnnnnnnnnnnnnnnnnnnnnnnnnnnnnnnnnnnnnnnnnnnnnnnnnnnnnnnnnnnnnnnnnnnnnnnnnnnnnnnnnnnnnnnnnnnnnnnnnnnnnnnnnnnnnnnnnnnnnnnnnnnnnnnnnnnnnnnnnnnnnnnnnnnnnnnnnnnnnnnnnnnnnnnnnnnnnnnnnnnnnnnnnnnnnnnnnnnnnnnnnnnnnnnnnnnnnnnnnnnnnnnnnnnnnnnnnnnnnnnnnnnnnnnnnnnnnnnnnnnnnnnnnnnnnnnnnnnnnnnnnnnnnnnnnnnnnnnnnnnnnnnnnnnnnnnnnnnnnnnnnnnnnnnnnnnnnnnnnnnnnnnnnnnnnnnnnnnnnnnnnnnnnnnnnnnnnnnnnnnnnnnnnnnnnnnnnnnnnnnnnnnnnnnnnnnnnnnnnnnnnnnnnnnnnnnnnnnnnnnnnnnnnnnnnnnnnnnnnnnnnnnnnnnnnnnnnnnnnnnnnnnnnnnnnnnnnnnnnnnnnnnnnnnnnnnnnnnnnnnnnnnnnnnnnnnnnnnnnnnnnnnnnnnnnnnnnnnnnnnnnnnnnnnnnnnnnnnnnnnnnnnnnnnnnnnnnnnnnnnnnnnnnnnnnnnnnnnnnnnnnnnnnnnnnnnnnnnnnnnnnnnnnnnnnnnnnnnnnnnnnnnnnnnnnnnnnnnnnnnnnnnnnnnnnnnnnnnnnnnnnnnnnnnnnnnnnnnnnnnnnnnnnnnnnnnnnnnnnnnnnnnnnnnnnnnnnnnnnnnnnnnnnnnnnnnnnnnnnnnnnnnnnnnnnnnnnnnnnnnnnnnnnnnnnnnnnnnnnnnnnnnnnnnnnnnnnnnnnnnnnnnnnnnnnnnnnnnnnnnnnnnnnnnnnnnnnnnnnnnnnnnnnnnnnnnnnnnnnnnnnnnnnnnnnnnnnnnnnnnnnnnnnnnnnnnnnnnnnnnnnnnnnnnnnnnnnnnnnnnnnnnnnnnnnnnnnnnnnnnnnnnnnnnnnnnnnnnnnnnnnnnnnnnnnnnnnnnnnnnnnnnnnnnnnnnnnnnnnnnnnnnnnnnnnnnnnnnnnnnnnnnnnnnnnnnnnnnnnnnnnnnnnnnnnnnnnnnnnnnnnnnnnnnnnnnnnnnnnnnnnnnnnnnnnnnnnnnnnnnnnnnnnnnnnnnnnnnnnnnnnnnnnnnnnnnnnnnnnnnnnnnnnnnnnnnnnnnnnnnnnnnnnnnnnnnnnnnnnnnnnnnnnnnnnnnnnnnnnnnnnnnnnnnnnnnnnnnnnnnnnnnnnnnnnnnnnnnnnnnnnnnnnnnnnnnnnnnnnnnnnnnnnnnnnnnnnnnnnnnnnnnnnnnnnnnnnnnnnnnnnnnnnnnnnnnnnnnnnnnnnnnnnnnnnnnnnnnnnnnnnnnnnnnnnnnnnnnnnnnnnnnnnnnnnnnnnnnnnnnnnnnnnnnnnnnnnnnnnnnnnnnnnnnnnnnnnnnnnnnnnnnnnnnnnnnnnnnnnnnnnnnnnnnnnnnnnnnnnnnnnnnnnnnnnnnnnnnnnnnnnnnnnnnnnnnnnnnnnnnnnnnnnnnnnnnnnnnnnnnnnnnnnnnnnnnnnnnnnnnnnnnnnnnnnnnnnnnnnnnnnnnnnnnnnnnnnnnnnnnnnnnnnnnnnnnnnnnnnnnnnnnnnnnnnnnnnnnnnnnnnnnnnnnnnnnnnnnnnnnnnnnnnnnnnnnnnnnnnnnnnnnnnnnnnnnnnnnnnnnnnnnnnnnnnnnnnnnnnnnnnnnnnnnnnnnnnnnnnnnnnnnnnnnnnnnnnnnnnnnnnnnnnnnnnnnnnnnnnnnnnnnnnnnnnnnnnnnnnnnnnnnnnnnnnnnnnnnnnnnnnnnnnnnnnnnnnnnnnnnnnnnnnnnnnnnnnnnnnnnnnnnnnnnnnnnnnnnnnnnnnnnnnnnnnnnnnnnnnnnnnnnnnnnnnnnnnnnnnnnnnnnnnnnnnnnnnnnnnnnnnnnnnnnnnnnnnnnnnnnnnnnnnnnnnnnnnnnnnnnnnnnnnnnnnnnnnnnnnnnnnnnnnnnnnnnnnnnnnnnnnnnnnnnnnnnnnnnnnnnnnnnnnnnnnnnnnnnnnnnnnnnnnnnnnnnnnnnnnnnnnnnnnnnnnnnnnnnnnnnnnnnnnnnnnnnnnnnnnnnnnnnnnnnnnnnnnnnnnnnnnnnnnnnnnnnnnnnnnnnnnnnnnnnnnnnnnnnnnnnnnnnnnnnnnnnnnnnnnnnnnnnnnnnnnnnnnnnnnnnnnnnnnnnnnnnnnnnnnnnnnnnnnnnnnnnnnnnnnnnnnnnnnnnnnnnnnnnnnnnnnnnnnnnnnnnnnnnnnnnnnnnnnnnnnnnnnnnnnnnnnnnnnnnnnnnnnnnnnnnnnnnnnnnnnnnnnnnnnnnnnnnnnnnnnnnnnnnnnnnnnnnnnnnnnnnnnnnnnnnnnnnnnnnnnnnnnnnnnnnnnnnnnnnnnnnnnnnnnnnnnnnnnnnnnnnnnnnnnnnnnnnnnnnnnnnnnnnnnnnnnnnnnnnnnnnnnnnnnnnnnnnnnnnnnnnnnnnnnnnnnnnnnnnnnnnnnnnnnnnnnnnnnnnnnnnnnnnnnnnnnnnnnnnnnnnnnnnnnnnnnnnnnnnnnnnnnnnnnnnnnnnnnnnnnnnnnnnnnnnnnnnnnnnnnnnnnnnnnnnnnnnnnnnnnnnnnnnnnnnnnnnnnnnnnnnnnnnnnnnnnnnnnnnnnnnnnnnnnnnnnnnnnnnnnnnnnnnnnnnnnnnnnnnnnnnnnnnnnnnnnnnnnnnnnnnnnnnnnnnnnnnnnnnnnnnnnnnnnnnnnnnnnnnnnnnnnnnnnnnnnnnnnnnnnnnnnnnnnnnnnnnnnnnnnnnnnnnnnnnnnnnnnnnnnnnnnnnnnnnnnnnnnnnnnnnnnnnnnnnnnnnnnnnnnnnnnnnnnnnnnnnnnnnnnnnnnnnnnnnnnnnnnnnnnnnnnnnnnnnnnnnnnnnnnnnnnnnnnnnnnnnnnnnnnnnnnnnnnnnnnnnnnnnnnnnnnnnnnnnnnnnnnnnnnnnnnnnnnnnnnnnnnnnnnnnnnnnnnnnnnnnnnnnnnnnnnnnnnnnnnnnnnnnnnnnnnnnnnnnnnnnnnnnnnnnnnnnnnnnnnnnnnnnnnnnnnnnnnnnnnnnnnnnnnnnnnnnnnnnnnnnnnnnnnnnnnnnnnnnnnnnnnnnnnnnnnnnnnnnnnnnnnnnnnnnnnnnnnnnnnnnnnnnnnnnnnnnnnnnnnnnnnnnnnnnnnnnnnnnnnnnnnnnnnnnnnnnnnnnnnnnnnnnnnnnnnnnnnnnnnnnnnnnnnnnnnnnnnnnnnnnnnnnnnnnnnnnnnnnnnnnnnnnnnnnnnnnnnnnnnnnnnnnnnnnnnnnnnnnnnnnnnnnnnnnnnnnnnnnnnnnnnnnnnnnnnnnnnnnnnnnnnnnnnnnnnnnnnnnnnnnnnnnnnnnnnnnnnnnnnnnnnnnnnnnnnnnnnnnnnnnnnnnnnnnnnnnnnnnnnnnnnnnnnnnnnnnnnnnnnnnnnnnnnnnnnnnnnnnnnnnnnnnnnnnnnnnnnnnnnnnnnnnnnnnnnnnnnnnnnnnnnnnnnnnnnnnnnnnnnnnnnnnnnnnnnnnnnnnnnnnnnnnnnnnnnnnnnnnnnnnnnnnnnnnnnnnnnnnnnnnnnnnnnnnnnnnnnnnnnnnnnnnnnnnnnnnnnnnnnnnnnnnnnnnnnnnnnnnnnnnnnnnnnnnnnnnnnnnnnnnnnnnnnnnnnnnnnnnnnnnnnnnnnnnnnnnnnnnnnnnnnnnnnnnnnnnnnnnnnnnnnnnnnnnnnnnnnnnnnnnnnnnnnnnnnnnnnnnnnnnnnnnnnnnnnnnnnnnnnnnnnnnnnnnnnnnnnnnnnnnnnnnnnnnnnnnnnnnnnnnnnnnnnnnnnnnnnnnnnnnnnnnnnnnnnnnnnnnnnnnnnnnnnnnnnnnnnnnnnnnnnnnnnnnnnnnnnnnnnnnnnnnnnnnnnnnnnnnnnnnnnnnnnnnnnnnnnnnnnnnnnnnnnnnnnnnnnnnnnnnnnnnnnnnnnnnnnnnnnnnnnnnnnnnnnnnnnnnnnnnnnnnnnnnnnnnnnnnnnnnnnnnnnnnnnnnnnnnnnnnnnnnnnnnnnnnnnnnnnnnnnnnnnnnnnnnnnnnnnnnnnnnnnnnnnnnnnnnnnnnnnnnnnnnnnnnnnnnnnnnnnnnnnnnnnnnnnnnnnnnnnnnnnnnnnnnnnnnnnnnnnnnnnnnnnnnnnnnnnnnnnnnnnnnnnnnnnnnnnnnnnnnnnnnnnnnnnnnnnnnnnnnnnnnnnnnnnnnnnnnnnnnnnnnnnnnnnnnnnnnnnnnnnnnnnnnnnnnnnnnnnnnnnnnnnnnnnnnnnnnnnnnnnnnnnnnnnnnnnnnnnnnnnnnnnnnnnnnnnnnnnnnnnnnnnnnnnnnnnnnnnnnnnnnnnnnnnnnnnnnnnnnnnnnnnnnnnnnnnnnnnnnnnnnnnnnnnnnnnnnnnnnnnnnnnnnnnnnnnnnnnnnnnnnnnnnnnnnnnnnnnnnnnnnnnnnnnnnnnnnnnnnnnnnnnnnnnnnnnnnnnnnnnnnnnnnnnnnnnnnnnnnnnnnnnnnnnnnnnnnnnnnnnnnnnnnnnnnnnnnnnnnnnnnnnnnnnnnnnnnnnnnnnnnnnnnnnnnnnnnnnnnnnnnnnnnnnnnnnnnnnnnnnnnnnnnnnnnnnnnnnnnnnnnnnnnnnnnnnnnnnnnnnnnnnnnnnnnnnnnnnnnnnnnnnnnnnnnnnnnnnnnnnnnnnnnnnnnnnnnnnnnnnnnnnnnnnnnnnnnnnnnnnnnnnnnnnnnnnnnnnnnnnnnnnnnnnnnnnnnnnnnnnnnnnnnnnnnnnnnnnnnnnnnnnnnnnnnnnnnnnnnnnnnnnnnnnnnnnnnnnnnnnnnnnnnnnnnnnnnnnnnnnnnnnnnnnnnnnnnnnnnnnnnnnnnnnnnnnnnnnnnnnnnnnnnnnnnnnnnnnnnnnnnnnnnnnnnnnnnnnnnnnnnnnnnnnnnnnnnnnnnnnnnnnnnnnnnnnnnnnnnnnnnnnnnnnnnnnnnnnnnnnnnnnnnnnnnnnnnnnnnnnnnnnnnnnnnnnnnnnnnnnnnnnnnnnnnnnnnnnnnnnnnnnnnnnnnnnnnnnnnnnnnnnnnnnnnnnnnnnnnnnnnnnnnnnnnnnnnnnnnnnnnnnnnnnnnnnnnnnnnnnnnnnnnnnnnnnnnnnnnnnnnnnnnnnnnnnnnnnnnnnnnnnnnnnnnnnnnnnnnnnnnnnnnnnnnnnnnnnnnnnnnnnnnnnnnnnnnnnnnnnnnnnnnnnnnnnnnnnnnnnnnnnnnnnnnnnnnnnnnnnnnnnnnnnnnnnnnnnnnnnnnnnnnnnnnnnnnnnnnnnnnnnnnnnnnnnnnnnnnnnnnnnnnnnnnnnnnnnnnnnnnnnnnnnnnnnnnnnnnnnnnnnnnnnnnnnnnnnnnnnnnnnnnnnnnnnnnnnnnnnnnnnnnnnnnnnnnnnnnnnnnnnnnnnnnnnnnnnnnnnnnnnnnnnnnnnnnnnnnnnnnnnnnnnnnnnnnnnnnnnnnnnnnnnnnnnnnnnnnnnnnnnnnnnnnnnnnnnnnnnnnnnnnnnnnnnnnnnnnnnnnnnnnnnnnnnnnnnnnnnnnnnnnnnnnnnnnnnnnnnnnnnnnnnnnnnnnnnnnnnnnnnnnnnnnnnnnnnnnnnnnnnnnnnnnnnnnnnnnnnnnnnnnnnnnnnnnnnnnnnnnnnnnnnnnnnnnnnnnnnnnnnnnnnnnnnnnnnnnnnnnnnnnnnnnnnnnnnnnnnnnnnnnnnnnnnnnnnnnnnnnnnnnnnnnnnnnnnnnnnnnnnnnnnnnnnnnnnnnnnnnnnnnnnnnnnnnnnnnnnnnnnnnnnnnnnnnnnnnnnnnnnnnnnnnnnnnnnnnnnnnnnnnnnnnnnnnnnnnnnnnnnnnnnnnnnnnnnnnnnnnnnnnnnnnnnnnnnnnnnnnnnnnnnnnnnnnnnnnnnnnnnnnnnnnnnnnnnnnnnnnnnnnnnnnnnnnnnnnnnnnnnnnnnnnnnnnnnnnnnnnnnnnnnnnnnnnnnnnnnnnnnnnnnnnnnnnnnnnnnnnnnnnnnnnnnnnnnnnnnnnnnnnnnnnnnnnnnnnnnnnnnnnnnnnnnnnnnnnnnnnnnnnnnnnnnnnnnnnnnnnnnnnnnnnnnnnnnnnnnnnnnnnnnnnnnnnnnnnnnnnnnnnnnnnnnnnnnnnnnnnnnnnnnnnnnnnnnnnnnnnnnnnnnnnnnnnnnnnnnnnnnnnnnnnnnnnnnnnnnnnnnnnnnnnnnnnnnnnnnnnnnnnnnnnnnnnnnnnnnnnnnnnnnnnnnnnnnnnnnnnnnnnnnnnnnnnnnnnnnnnnnnnnnnnnnnnnnnnnnnnnnnnnnnnnnnnnnnnnnnnnnnnnnnnnnnnnnnnnnnnnnnnnnnnnnnnnnnnnnnnnnnnnnnnnnnnnnnnnnnnnnnnnnnnnnnnnnnnnnnnnnnnnnnnnnnnnnnnnnnnnnnnnnnnnnnnnnnnnnnnnnnnnnnnnnnnnnnnnnnnnnnnnnnnnnnnnnnnnnnnnnnnnnnnnnnnnnnnnnnnnnnnnnnnnnnnnnnnnnnnnnnnnnnnnnnnnnnnnnnnnnnnnnnnnnnnnnnnnnnnnnnnnnnnnnnnnnnnnnnnnnnnnnnnnnnnnnnnnnnnnnnnnnnnnnnnnnnnnnnnnnnnnnnnnnnnnnnnnnnnnnnnnnnnnnnnnnnnnnnnnnnnnnnnnnnnnnnnnnnnnnnnnnnnnnnnnnnnnnnnnnnnnnnnnnnnnnnnnnnnnnnnnnnnnnnnnnnnnnnnnnnnnnnnnnnnnnnnnnnnnnnnnnnnnnnnnnnnnnnnnnnnnnnnnnnnnnnnnnnnnnnnnnnnnnnnnnnnnnnnnnnnnnnnnnnnnnnnnnnnnnnnnnnnnnnnnnnnnnnnnnnnnnnnnnnnnnnnnnnnnnnnnnnnnnnnnnnnnnnnnnnnnnnnnnnnnnnnnnnnnnnnnnnnnnnnnnnnnnnnnnnnnnnnnnnnnnnnnnnnnnnnnnnnnnnnnnnnnnnnnnnnnnnnnnnnnnnnnnnnnnnnnnnnnnnnnnnnnnnnnnnnnnnnnnnnnnnnnnnnnnnnnnnnnnnnnnnnnnnnnnnnnnnnnnnnnnnnnnnnnnnnnnnnnnnnnnnnnnnnnnnnnnnnnnnnnnnnnnnnnnnnnnnnnnnnnnnnnnnnnnnnnnnnnnnnnnnnnnnnnnnnnnnnnnnnnnnnnnnnnnnnnnnnnnnnnnnnnnnnnnnnnnnnnnnnnnnnnnnnnnnnnnnnnnnnnnnnnnnnnnnnnnnnnnnnnnnnnnnnnnnnnnnnnnnnnnnnnnnnnnnnnnnnnnnnnnnnnnnnnnnnnnnnnnnnnnnnnnnnnnnnnnnnnnnnnnnnnnnnnnnnnnnnnnnnnnnnnnnnnnnnnnnnnnnnnnnnnnnnnnnnnnnnnnnnnnnnnnnnnnnnnnnnnnnnnnnnnnnnnnnnnnnnnnnnnnnnnnnnnnnnnnnnnnnnnnnnnnnnnnnnnnnnnnnnnnnnnnnnnnnnnnnnnnnnnnnnnnnnnnnnnnnnnnnnnnnnnnnnnnnnnnnnnnnnnnnnnnnnnnnnnnnnnnnnnnnnnnnnnnnnnnnnnnnnnnnnnnnnnnnnnnnnnnnnnnnnnnnnnnnnnnnnnnnnnnnnnnnnnnnnnnnnnnnnnnnnnnnnnnnnnnnnnnnnnnnnnnnnnnnnnnnnnnnnnnnnnnnnnnnnnnnnnnnnnnnnnnnnnnnnnnnnnnnnnnnnnnnnnnnnnnnnnnnnnnnnnnnnnnnnnnnnnnnnnnnnnnnnnnnnnnnnnnnnnnnnnnnnnnnnnnnnnnnnnnnnnnnnnnnnnnnnnnnnnnnnnnnnnnnnnnnnnnnnnnnnnnnnnnnnnnnnnnnnnnnnnnnnnnnnnnnnnnnnnnnnnnnnnnnnnnnnnnnnnnnnnnnnnnnnnnnnnnnnnnnnnnnnnnnnnnnnnnnnnnnnnnnnnnnnnnnnnnnnnnnnnnnnnnnnnnnnnnnnnnnnnnnnnnnnnnnnnnnnnnnnnnnnnnnnnnnnnnnnnnnnnnnnnnnnnnnnnnnnnnnnnnnnnnnnnnnnnnnnnnnnnnnnnnnnnnnnnnnnnnnnnnnnnnnnnnnnnnnnnnnnnnnnnnnnnnnnnnnnnnnnnnnnnnnnnnnnnnnnnnnnnnnnnnnnnnnnnnnnnnnnnnnnnnnnnnnnnnnnnnnnnnnnnnnnnnnnnnnnnnnnnnnnnnnnnnnnnnnnnnnnnnnnnnnnnnnnnnnnnnnnnnnnnnnnnnnnnnnnnnnnnnnnnnnnnnnnnnnnnnnnnnnnnnnnnnnnnnnnnnnnnnnnnnnnnnnnnnnnnnnnnnnnnnnnnnnnnnnnnnnnnnnnnnnnnnnnnnnnnnnnnnnnnnnnnnnnnnnnnnnnnnnnnnnnnnnnnnnnnnnnnnnnnnnnnnnnnnnnnnnnnnnnnnnnnnnnnnnnnnnnnnnnnnnnnnnnnnnnnnnnnnnnnnnnnnnnnnnnnnnnnnnnnnnnnnnnnnnnnnnnnnnnnnnnnnnnnnnnnnnnnnnnnnnnnnnnnnnnnnnnnnnnnnnnnnnnnnnnnnnnnnnnnnnnnnnnnnnnnnnnnnnnnnnnnnnnnnnnnnnnnnnnnnnnnnnnnnnnnnnnnnnnnnnnnnnnnnnnnnnnnnnnnnnnnnnnnnnnnnnnnnnnnnnnnnnnnnnnnnnnnnnnnnnnnnnnnnnnnnnnnnnnnnnnnnnnnnnnnnnnnnnnnnnnnnnnnnnnnnnnnnnnnnnnnnnnnnnnnnnnnnnnnnnnnnnnnnnnnnnnnnnnnnnnnnnnnnnnnnnnnnnnnnnnnnnnnnnnnnnnnnnnnnnnnnnnnnnnnnnnnnnnnnnnnnnnnnnnnnnnnnnnnnnnnnnnnnnnnnnnnnnnnnnnnnnnnnnnnnnnnnnnnnnnnnnnnnnnnnnnnnnnnnnnnnnnnnnnnnnnnnnnnnnnnnnnnnnnnnnnnnnnnnnnnnnnnnnnnnnnnnnnnnnnnnnnnnnnnnnnnnnnnnnnnnnnnnnnnnnnnnnnnnnnnnnnnnnnnnnnnnnnnnnnnnnnnnnnnnnnnnnnnnnnnnnnnnnnnnnnnnnnnnnnnnnnnnnnnnnnnnnnnnnnnnnnnnnnnnnnnnnnnnnnnnnnnnnnnnnnnnnnnnnnnnnnnnnnnnnnnnnnnnnnnnnnnnnnnnnnnnnnnnnnnnnnnnnnnnnnnnnnnnnnnnnnnnnnnnnnnnnnnnnnnnnnnnnnnnnnnnnnnnnnnnnnnnnnnnnnnnnnnnnnnnnnnnnnnnnnnnnnnnnnnnnnnnnnnnnnnnnnnnnnnnnnnnnnnnnnnnnnnnnnnnnnnnnnnnnnnnnnnnnnnnnnnnnnnnnnnnnnnnnnnnnnnnnnnnnnnnnnnnnnnnnnnnnnnnnnnnnnnnnnnnnnnnnnnnnnnnnnnnnnnnnnnnnnnnnnnnnnnnnnnnnnnnnnnnnnnnnnnnnnnnnnnnnnnnnnnnnnnnnnnnnnnnnnnnnnnnnnnnnnnnnnnnnnnnnnnnnnnnnnnnnnnnnnnnnnnnnnnnnnnnnnnnnnnnnnnnnnnnnnnnnnnnnnnnnnnnnnnnnnnnnnnnnnnnnnnnnnnnnnnnnnnnnnnnnnnnnnnnnnnnnnnnnnnnnnnnnnnnnnnnnnnnnnnnnnnnnnnnnnnnnnnnnnnnnnnnnnnnnnnnnnnnnnnnnnnnnnnnnnnnnnnnnnnnnnnnnnnnnnnnnnnnnnnnnnnnnnnnnnnnnnnnnnnnnnnnnnnnnnnnnnnnnnnnnnnnnnnnnnnnnnnnnnnnnnnnnnnnnnnnnnnnnnnnnnnnnnnnnnnnnnnnnnnnnnnnnnnnnnnnnnnnnnnnnnnnnnnnnnnnnnnnnnnnnnnnnnnnnnnnnnnnnnnnnnnnnnnnnnnnnnnnnnnnnnnnnnnnnnnnnnnnnnnnnnnnnnnnnnnnnnnnnnnnnnnnnnnnnnnnnnnnnnnnnnnnnnnnnnnnnnnnnnnnnnnnnnnnnnnnnnnnnnnnnnnnnnnnnnnnnnnnnnnnnnnnnnnnnnnnnnnnnnnnnnnnnnnnnnnnnnnnnnnnnnnnnnnnnnnnnnnnnnnnnnnnnnnnnnnnnnnnnnnnnnnnnnnnnnnnnnnnnnnnnnnnnnnnnnnnnnnnnnnnnnnnnnnnnnnnnnnnnnnnnnnnnnnnnnnnnnnnnnnnnnnnnnnnnnnnnnnnnnnnnnnnnnnnnnnnnnnnnnnnnnnnnnnnnnnnnnnnnnnnnnnnnnnnnnnnnnnnnnnnnnnnnnnnnnnnnnnnnnnnnnnnnnnnnnnnnnnnnnnnnnnnnnnnnnnnnnnnnnnnnnnnnnnnnnnnnnnnnnnnnnnnnnnnnnnnnnnnnnnnnnnnnnnnnnnnnnnnnnnnnnnnnnnnnnnnnnnnnnnnnnnnnnnnnnnnnnnnnnnnnnnnnnnnnnnnnnnnnnnnnnnnnnnnnnnnnnnnnnnnnnnnnnnnnnnnnnnnnnnnnnnnnnnnnnnnnnnnnnnnnnnnnnnnnnnnnnnnnnnnnnnnnnnnnnnnnnnnnnnnnnnnnnnnnnnnnnnnnnnnnnnnnnnnnnnnnnnnnnnnnnnnnnnnnnnnnnnnnnnnnnnnnnnnnnnnnnnnnnnnnnnnnnnnnnnnnnnnnnnnnnnnnnnnnnnnnnnnnnnnnnnnnnnnnnnnnnnnnnnnnnnnnnnnnnnnnnnnnnnnnnnnnnnnnnnnnnnnnnnnnnnnnnnnnnnnnnnnnnnnnnnnnnnnnnnnnnnnnnnnnnnnnnnnnnnnnnnnnnnnnnnnnnnnnnnnnnnnnnnnnnnnnnnnnnnnnnnnnnnnnnnnnnnnnnnnnnnnnnnnnnnnnnnnnnnnnnnnnnnnnnnnnnnnnnnnnnnnnnnnnnnnnnnnnnnnnnnnnnnnnnnnnnnnnnnnnnnnnnnnnnnnnnnnnnnnnnnnnnnnnnnnnnnnnnnnnnnnnnnnnnnnnnnnnnnnnnnnnnnnnnnnnnnnnnnnnnnnnnnnnnnnnnnnnnnnnnnnnnnnnnnnnnnnnnnnnnnnnnnnnnnnnnnnnnnnnnnnnnnnnnnnnnnnnnnnnnnnnnnnnnnnnnnnnnnnnnnnnnnnnnnnnnnnnnnnnnnnnnnnnnnnnnnnnnnnnnnnnnnnnnnnnnnnnnnnnnnnnnnnnnnnnnnnnnnnnnnnnnnnnnnnnnnnnnnnnnnnnnnnnnnnnnnnnnnnnnnnnnnnnnnnnnnnnnnnnnnnnnnnnnnnnnnnnnnnnnnnnnnnnnnnnnnnnnnnnnnnnnnnnnnnnnnnnnnnnnnnnnnnnnnnnnnnnnnnnnnnnnnnnnnnnnnnnnnnnnnnnnnnnnnnnnnnnnnnnnnnnnnnnnnnnnnnnnnnnnnnnnnnnnnnnnnnnnnnnnnnnnnnnnnnnnnnnnnnnnnnnnnnnnnnnnnnnnnnnnnnnnnnnnnnnnnnnnnnnnnnnnnnnnnnnnnnnnnnnnnnnnnnnnnnnnnnnnnnnnnnnnnnnnnnnnnnnnnnnnnnnnnnnnnnnnnnnnnnnnnnnnnnnnnnnnnnnnnnnnnnnnnnnnnnnnnnnnnnnnnnnnnnnnnnnnnnnnnnnnnnnnnnnnnnnnnnnnnnnnnnnnnnnnnnnnnnnnnnnnnnnnnnnnnnnnnnnnnnnnnnnnnnnnnnnnnnnnnnnnnnnnnnnnnnnnnnnnnnnnnnnnnnnnnnnnnnnnnnnnnnnnnnnnnnnnnnnnnnnnnnnnnnnnnnnnnnnnnnnnnnnnnnnnnnnnnnnnnnnnnnnnnnnnnnnnnnnnnnnnnnnnnnnnnnnnnnnnnnnnnnnnnnnnnnnnnnnnnnnnnnnnnnnnnnnnnnnnnnnnnnnnnnnnnnnnnnnnnnnnnnnnnnnnnnnnnnnnnnnnnnnnnnnnnnnnnnnnnnnnnnnnnnnnnnnnnnnnnnnnnnnnnnnnnnnnnnnnnnnnnnnnnnnnnnnnnnnnnnnnnnnnnnnnnnnnnnnnnnnnnnnnnnnnnnnnnnnnnnnnnnnnnnnnnnnnnnnnnnnnnnnnnnnnnnnnnnnnnnnnnnnnnnnnnnnnnnnnnnnnnnnnnnnnnnnnnnnnnnnnnnnnnnnnnnnnnnnnnnnnnnnnnnnnnnnnnnnnnnnnnnnnnnnnnnnnnnnnnnnnnnnnnnnnnnnnnnnnnnnnnnnnnnnnnnnnnnnnnnnnnnnnnnnnnnnnnnnnnnnnnnnnnnnnnnnnnnnnnnnnnnnnnnnnnnnnnnnnnnnnnnnnnnnnnnnnnnnnnnnnnnnnnnnnnnnnnnnnnnnnnnnnnnnnnnnnnnnnnnnnnnnnnnnnnnnnnnnnnnnnnnnnnnnnnnnnnnnnnnnnnnnnnnnnnnnnnnnnnnnnnnnnnnnnnnnnnnnnnnnnnnnnnnnnnnnnnnnnnnnnnnnnnnnnnnnnnnnnnnnnnnnnnnnnnnnnnnnnnnnnnnnnnnnnnnnnnnnnnnnnnnnnnnnnnnnnnnnnnnnnnnnnnnnnnnnnnnnnnnnnnnnnnnnnnnnnnnnnnnnnnnnnnnnnnnnnnnnnnnnnnnnnnnnnnnnnnnnnnnnnnnnnnnnnnnnnnnnnnnnnnnnnnnnnnnnnnnnnnnnnnnnnnnnnnnnnnnnnnnnnnnnnnnnnnnnnnnnnnnnnnnnnnnnnnnnnnnnnnnnnnnnnnnnnnnnnnnnnnnnnnnnnnnnnnnnnnnnnnnnnnnnnnnnnnnnnnnnnnnnnnnnnnnnnnnnnnnnnnnnnnnnnnnnnnnnnnnnnnnnnnnnnnnnnnnnnnnnnnnnnnnnnnnnnnnnnnnnnnnnnnnnnnnnnnnnnnnnnnnnnnnnnnnnnnnnnnnnnnnnnnnnnnnnnnnnnnnnnnnnnnnnnnnnnnnnnnnnnnnnnnnnnnnnnnnnnnnnnnnnnnnnnnnnnnnnnnnnnnnnnnnnnnnnnnnnnnnnnnnnnnnnnnnnnnnnnnnnnnnnnnnnnnnnnnnnnnnnnnnnnnnnnnnnnnnnnnnnnnnnnnnnnnnnnnnnnnnnnnnnnnnnnnnnnnnnnnnnnnnnnnnnnnnnnnnnnnnnnnnnnnnnnnnnnnnnnnnnnnnnnnnnnnnnnnnnnnnnnnnnnnnnnnnnnnnnnnnnnnnnnnnnnnnnnnnnnnnnnnnnnnnnnnnnnnnnnnnnnnnnnnnnnnnnnnnnnnnnnnnnnnnnnnnnnnnnnnnnnnnnnnnnnnnnnnnnnnnnnnnnnnnnnnnnnnnnnnnnnnnnnnnnnnnnnnnnnnnnnnnnnnnnnnnnnnnnnnnnnnnnnnnnnnnnnnnnnnnnnnnnnnnnnnnnnnnnnnnnnnnnnnnnnnnnnnnnnnnnnnnnnnnnnnnnnnnnnnnnnnnnnnnnnnnnnnnnnnnnnnnnnnnnnnnnnnnnnnnnnnnnnnnnnnnnnnnnnnnnnnnnnnnnnnnnnnnnnnnnnnnnnnnnnnnnnnnnnnnnnnnnnnnnnnnnnnnnnnnnnnnnnnnnnnnnnnnnnnnnnnnnnnnnnnnnnnnnnnnnnnnnnnnnnnnnnnnnnnnnnnnnnnnnnnnnnnnnnnnnnnnnnnnnnnnnnnnnnnnnnnnnnnnnnnnnnnnnnnnnnnnnnnnnnnnnnnnnnnnnnnnnnnnnnnnnnnnnnnnnnnnnnnnnnnnnnnnnnnnnnnnnnnnnnnnnnnnnnnnnnnnnnnnnnnnnnnnnnnnnnnnnnnnnnnnnnnnnnnnnnnnnnnnnnnnnnnnnnnnnnnnnnnnnnnnnnnnnnnnnnnnnnnnnnnnnnnnnnnnnnnnnnnnnnnnnnnnnnnnnnnnnnnnnnnnnnnnnnnnnnnnnnnnnnnnnnnnnnnnnnnnnnnnnnnnnnnnnnnnnnnnnnnnnnnnnnnnnnnnnnnnnnnnnnnnnnnnnnnnnnnnnnnnnnnnnnnnnnnnnnnnnnnnnnnnnnnnnnnnnnnnnnnnnnnnnnnnnnnnnnnnnnnnnnnnnnnnnnnnnnnnnnnnnnnnnnnnnnnnnnnnnnnnnnnnnnnnnnnnnnnnnnnnnnnnnnnnnnnnnnnnnnnnnnnnnnnnnnnnnnnnnnnnnnnnnnnnnnnnnnnnnnnnnnnnnnnnnnnnnnnnnnnnnnnnnnnnnnnnnnnnnnnnnnnnnnnnnnnnnnnnnnnnnnnnnnnnnnnnnnnnnnnnnnnnnnnnnnnnnnnnnnnnnnnnnnnnnnnnnnnnnnnnnnnnnnnnnnnnnnnnnnnnnnnnnnnnnnnnnnnnnnnnnnnnnnnnnnnnnnnnnnnnnnnnnnnnnnnnnnnnnnnnnnnnnnnnnnnnnnnnnnnnnnnnnnnnnnnnnnnnnnnnnnnnnnnnnnnnnnnnnnnnnnnnnnnnnnnnnnnnnnnnnnnnnnnnnnnnnnnnnnnnnnnnnnnnnnnnnnnnnnnnnnnnnnnnnnnnnnnnnnnnnnnnnnnnnnnnnnnnnnnnnnnnnnnnnnnnnnnnnnnnnnnnnnnnnnnnnnnnnnnnnnnnnnnnnnnnnnnnnnnnnnnnnnnnnnnnnnnnnnnnnnnnnnnnnnnnnnnnnnnnnnnnnnnnnnnnnnnnnnnnnnnnnnnnnnnnnnnnnnnnnnnnnnnnnnnnnnnnnnnnnnnnnnnnnnnnnnnnnnnnnnnnnnnnnnnnnnnnnnnnnnnnnnnnnnnnnnnnnnnnnnnnnnnnnnnnnnnnnnnnnnnnnnnnnnnnnnnnnnnnnnnnnnnnnnnnnnnnnnnnnnnnnnnnnnnnnnnnnnnnnnnnnnnnnnnnnnnnnnnnnnnnnnnnnnnnnnnnnnnnnnnnnnnnnnnnnnnnnnnnnnnnnnnnnnnnnnnnnnnnnnnnnnnnnnnnnnnnnnnnnnnnnnnnnnnnnnnnnnnnnnnnnnnnnnnnnnnnnnnnnnnnnnnnnnnnnnnnnnnnnnnnnnnnnnnnnnnnnnnnnnnnnnnnnnnnnnnnnnnnnnnnnnnnnnnnnnnnnnnnnnnnnnnnnnnnnnnnnnnnnnnnnnnnnnnnnnnnnnnnnnnnnnnnnnnnnnnnnnnnnnnnnnnnnnnnnnnnnnnnnnnnnnnnnnnnnnnnnnnnnnnnnnnnnnnnnnnnnnnnnnnnnnnnnnnnnnnnnnnnnnnnnnnnnnnnnnnnnnnnnnnnnnnnnnnnnnnnnnnnnnnnnnnnnnnnnnnnnnnnnnnnnnnnnnnnnnnnnnnnnnnnnnnnnnnnnnnnnnnnnnnnnnnnnnnnnnnnnnnnnnnnnnnnnnnnnnnnnnnnnnnnnnnnnnnnnnnnnnnnnnnnnnnnnnnnnnnnnnnnnnnnnnnnnnnnnnnnnnnnnnnnnnnnnnnnnnnnnnnnnnnnnnnnnnnnnnnnnnnnnnnnnnnnnnnnnnnnnnnnnnnnnnnnnnnnnnnnnnnnnnnnnnnnnnnnnnnnnnnnnnnnnnnnnnnnnnnnnnnnnnnnnnnnnnnnnnnnnnnnnnnnnnnnnnnnnnnnnnnnnnnnnnnnnnnnnnnnnnnnnnnnnnnnnnnnnnnnnnnnnnnnnnnnnnnnnnnnnnnnnnnnnnnnnnnnnnnnnnnnnnnnnnnnnnnnnnnnnnnnnnnnnnnnnnnnnnnnnnnnnnnnnnnnnnnnnnnnnnnnnnnnnnnnnnnnnnnnnnnnnnnnnnnnnnnnnnnnnnnnnnnnnnnnnnnnnnnnnnnnnnnnnnnnnnnnnnnnnnnnnnnnnnnnnnnnnnnnnnnnnnnnnnnnnnnnnnnnnnnnnnnnnnnnnnnnnnnnnnnnnnnnnnnnnnnnnnnnnnnnnnnnnnnnnnnnnnnnnnnnnnnnnnnnnnnnnnnnnnnnnnnnnnnnnnnnnnnnnnnnnnnnnnnnnnnnnnnnnnnnnnnnnnnnnnnnnnnnnnnnnnnnnnnnnnnnnnnnnnnnnnnnnnnnnnnnnnnnnnnnnnnnnnnnnnnnnnnnnnnnnnnnnnnnnnnnnnnnnnnnnnnnnnnnnnnnnnnnnnnnnnnnnnnnnnnnnnnnnnnnnnnnnnnnnnnnnnnnnnnnnnnnnnnnnnnnnnnnnnnnnnnnnnnnnnnnnnnnnnnnnnnnnnnnnnnnnnnnnnnnnnnnnnnnnnnnnnnnnnnnnnnnnnnnnnnnnnnnnnnnnnnnnnnnnnnnnnnnnnnnnnnnnnnnnnnnnnnnnnnnnnnnnnnnnnnnnnnnnnnnnnnnnnnnnnnnnnnnnnnnnnnnnnnnnnnnnnnnnnnnnnnnnnnnnnnnnnnnnnnnnnnnnnnnnnnnnnnnnnnnnnnnnnnnnnnnnnnnnnnnnnnnnnnnnnnnnnnnnnnnnnnnnnnnnnnnnnnnnnnnnnnnnnnnnnnnnnnnnnnnnnnnnnnnnnnnnnnnnnnnnnnnnnnnnnnnnnnnnnnnnnnnnnnnnnnnnnnnnnnnnnnnnnnnnnnnnnnnnnnnnnnnnnnnnnnnnnnnnnnnnnnnnnnnnnnnnnnnnnnnnnnnnnnnnnnnnnnnnnnnnnnnnnnnnnnnnnnnnnnnnnnnnnnnnnnnnnnnnnnnnnnnnnnnnnnnnnnnnnnnnnnnnnnnnnnnnnnnnnnnnnnnnnnnnnnnnnnnnnnnnnnnnnnnnnnnnnnnnnnnnnnnnnnnnnnnnnnnnnnnnnnnnnnnnnnnnnnnnnnnnnnnnnnnnnnnnnnnnnnnnnnnnnnnnnnnnnnnnnnnnnnnnnnnnnnnnnnnnnnnnnnnnnnnnnnnnnnnnnnnnnnnnnnnnnnnnnnnnnnnnnnnnnnnnnnnnnnnnnnnnnnnnnnnnnnnnnnnnnnnnnnnnnnnnnnnnnnnnnnnnnnnnnnnnnnnnnnnnnnnnnnnnnnnnnnnnnnnnnnnnnnnnnnnnnnnnnnnnnnnnnnnnnnnnnnnnnnnnnnnnnnnnnnnnnnnnnnnnnnnnnnnnnnnnnnnnnnnnnnnnnnnnnnnnnnnnnnnnnnnnnnnnnnnnnnnnnnnnnnnnnnnnnnnnnnnnnnnnnnnnnnnnnnnnnnnnnnnnnnnnnnnnnnnnnnnnnnnnnnnnnnnnnnnnnnnnnnnnnnnnnnnnnnnnnnnnnnnnnnnnnnnnnnnnnnnnnnnnnnnnnnnnnnnnnnnnnnnnnnnnnnnnnnnnnnnnnnnnnnnnnnnnnnnnnnnnnnnnnnnnnnnnnnnnnnnnnnnnnnnnnnnnnnnnnnnnnnnnnnnnnnnnnnnnnnnnnnnnnnnnnnnnnnnnnnnnnnnnnnnnnnnnnnnnnnnnnnnnnnnnnnnnnnnnnnnnnnnnnnnnnnnnnnnnnnnnnnnnnnnnnnnnnnnnnnnnnnnnnnnnnnnnnnnnnnnnnnnnnnnnnnnnnnnnnnnnnnnnnnnnnnnnnnnnnnnnnnnnnnnnnnnnnnnnnnnnnnnnnnnnnnnnnnnnnnnnnnnnnnnnnnnnnnnnnnnnnnnnnnnnnnnnnnnnnnnnnnnnnnnnnnnnnnnnnnnnnnnnnnnnnnnnnnnnnnnnnnnnnnnnnnnnnnnnnnnnnnnnnnnnnnnnnnnnnnnnnnnnnnnnnnnnnnnnnnnnnnnnnnnnnnnnnnnnnnnnnnnnnnnnnnnnnnnnnnnnnnnnnnnnnnnnnnnnnnnnnnnnnnnnnnnnnnnnnnnnnnnnnnnnnnnnnnnnnnnnnnnnnnnnnnnnnnnnnnnnnnnnnnnnnnnnnnnnnnnnnnnnnnnnnnnnnnnnnnnnnnnnnnnnnnnnnnnnnnnnnnnnnnnnnnnnnnnnnnnnnnnnnnnnnnnnnnnnnnnnnnnnnnnnnnnnnnnnnnnnnnnnnnnnnnnnnnnnnnnnnnnnnnnnnnnnnnnnnnnnnnnnnnnnnnnnnnnnnnnnnnnnnnnnnnnnnnnnnnnnnnnnnnnnnnnnnnnnnnnnnnnnnnnnnnnnnnnnnnnnnnnnnnnnnnnnnnnnnnnnnnnnnnnnnnnnnnnnnnnnnnnnnnnnnnnnnnnnnnnnnnnnnnnnnnnnnnnnnnnnnnnnnnnnnnnnnnnnnnnnnnnnnnnnnnnnnnnnnnnnnnnnnnnnnnnnnnnnnnnnnnnnnnnnnnnnnnnnnnnnnnnnnnnnnnnnnnnnnnnnnnnnnnnnnnnnnnnnnnnnnnnnnnnnnnnnnnnnnnnnnnnnnnnnnnnnnnnnnnnnnnnnnnnnnnnnnnnnnnnnnnnnnnnnnnnnnnnnnnnnnnnnnnnnnnnnnnnnnnnnnnnnnnnnnnnnnnnnnnnnnnnnnnnnnnnnnnnnnnnnnnnnnnnnnnnnnnnnnnnnnnnnnnnnnnnnnnnnnnnnnnnnnnnnnnnnnnnnnnnnnnnnnnnnnnnnnnnnnnnnnnnnnnnnnnnnnnnnnnnnnnnnnnnnnnnnnnnnnnnnnnnnnnnnnnnnnnnnnnnnnnnnnnnnnnnnnnnnnnnnnnnnnnnnnnnnnnnnnnnnnnnnnnnnnnnnnnnnnnnnnnnnnnnnnnnnnnnnnnnnnnnnnnnnnnnnnnnnnnnnnnnnnnnnnnnnnnnnnnnnnnnnnnnnnnnnnnnnnnnnnnnnnnnnnnnnnnnnnnnnnnnnnnnnnnnnnnnnnnnnnnnnnnnnnnnnnnnnnnnnnnnnnnnnnnnnnnnnnnnnnnnnnnnnnnnnnnnnnnnnnnnnnnnnnnnnnnnnnnnnnnnnnnnnnnnnnnnnnnnnnnnnnnnnnnnnnnnnnnnnnnnnnnnnnnnnnnnnnnnnnnnnnnnnnnnnnnnnnnnnnnnnnnnnnnnnnnnnnnnnnnnnnnnnnnnnnnnnnnnnnnnnnnnnnnnnnnnnnnnnnnnnnnnnnnnnnnnnnnnnnnnnnnnnnnnnnnnnnnnnnnnnnnnnnnnnnnnnnnnnnnnnnnnnnnnnnnnnnnnnnnnnnnnnnnnnnnnnnnnnnnnnnnnnnnnnnnnnnnnnnnnnnnnnnnnnnnnnnnnnnnnnnnnnnnnnnnnnnnnnnnnnnnnnnnnnnnnnnnnnnnnnnnnnnnnnnnnnnnnnnnnnnnnnnnnnnnnnnnnnnnnnnnnnnnnnnnnnnnnnnnnnnnnnnnnnnnnnnnnnnnnnnnnnnnnnnnnnnnnnnnnnnnnnnnnnnnnnnnnnnnnnnnnnnnnnnnnnnnnnnnnnnnnnnnnnnnnnnnnnnnnnnnnnnnnnnnnnnnnnnnnnnnnnnnnnnnnnnnnnnnnnnnnnnnnnnnnnnnnnnnnnnnnnnnnnnnnnnnnnnnnnnnnnnnnnnnnnnnnnnnnnnnnnnnnnnnnnnnnnnnnnnnnnnnnnnnnnnnnnnnnnnnnnnnnnnnnnnnnnnnnnnnnnnnnnnnnnnnnnnnnnnnnnnnnnnnnnnnnnnnnnnnnnnnnnnnnnnnnnnnnnnnnnnnnnnnnnnnnnnnnnnnnnnnnnnnnnnnnnnnnnnnnnnnnnnnnnnnnnnnnnnnnnnnnnnnnnnnnnnnnnnnnnnnnnnnnnnnnnnnnnnnnnnnnnnnnnnnnnnnnnnnnnnnnnnnnnnnnnnnnnnnnnnnnnnnnnnnnnnnnnnnnnnnnnnnnnnnnnnnnnnnnnnnnnnnnnnnnnnnnnnnnnnnnnnnnnnnnnnnnnnnnnnnnnnnnnnnnnnnnnnnnnnnnnnnnnnnnnnnnnnnnnnnnnnnnnnnnnnnnnnnnnnnnnnnnnnnnnnnnnnnnnnnnnnnnnnnnnnnnnnnnnnnnnnnnnnnnnnnnnnnnnnnnnnnnnnnnnnnnnnnnnnnnnnnnnnnnnnnnnnnnnnnnnnnnnnnnnnnnnnnnnnnnnnnnnnnnnnnnnnnnnnnnnnnnnnnnnnnnnnnnnnnnnnnnnnnnnnnnnnnnnnnnnnnnnnnnnnnnnnnnnnnnnnnnnnnnnnnnnnnnnnnnnnnnnnnnnnnnnnnnnnnnnnnnnnnnnnnnnnnnnnnnnnnnnnnnnnnnnnnnnnnnnnnnnnnnnnnnnnnnnnnnnnnnnnnnnnnnnnnnnnnnnnnnnnnnnnnnnnnnnnnnnnnnnnnnnnnnnnnnnnnnnnnnnnnnnnnnnnnnnnnnnnnnnnnnnnnnnnnnnnnnnnnnnnnnnnnnnnnnnnnnnnnnnnnnnnnnnnnnnnnnnnnnnnnnnnnnnnnnnnnnnnnnnnnnnnnnnnnnnnnnnnnnnnnnnnnnnnnnnnnnnnnnnnnnnnnnnnnnnnnnnnnnnnnnnnnnnnnnnnnnnnnnnnnnnnnnnnnnnnnnnnnnnnnnnnnnnnnnnnnnnnnnnnnnnnnnnnnnnnnnnnnnnnnnnnnnnnnnnnnnnnnnnnnnnnnnnnnnnnnnnnnnnnnnnnnnnnnnnnnnnnnnnnnnnnnnnnnnnnnnnnnnnnnnnnnnnnnnnnnnnnnnnnnnnnnnnnnnnnnnnnnnnnnnnnnnnnnnnnnnnnnnnnnnnnnnnnnnnnnnnnnnnnnnnnnnnnnnnnnnnnnnnnnnnnnnnnnnnnnnnnnnnnnnnnnnnnnnnnnnnnnnnnnnnnnnnnnnnnnnnnnnnnnnnnnnnnnnnnnnnnnnnnnnnnnnnnnnnnnnnnnnnnnnnnnnnnnnnnnnnnnnnnnnnnnnnnnnnnnnnnnnnnnnnnnnnnnnnnnnnnnnnnnnnnnnnnnnnnnnnnnnnnnnnnnnnnnnnnnnnnnnnnnnnnnnnnnnnnnnnnnnnnnnnnnnnnnnnnnnnnnnnnnnnnnnnnnnnnnnnnnnnnnnnnnnnnnnnnnnnnnnnnnnnnnnnnnnnnnnnnnnnnnnnnnnnnnnnnnnnnnnnnnnnnnnnnnnnnnnnnnnnnnnnnnnnnnnnnnnnnnnnnnnnnnnnnnnnnnnnnnnnnnnnnnnnnnnnnnnnnnnnnnnnnnnnnnnnnnnnnnnnnnnnnnnnnnnnnnnnnnnnnnnnnnnnnnnnnnnnnnnnnnnnnnnnnnnnnnnnnnnnnnnnnnnnnnnnnnnnnnnnnnnnnnnnnnnnnnnnnnnnnnnnnnnnnnnnnnnnnnnnnnnnnnnnnnnnnnnnnnnnnnnnnnnnnnnnnnnnnnnnnnnnnnnnnnnnnnnnnnnnnnnnnnnnnnnnnnnnnnnnnnnnnnnnnnnnnnnnnnnnnnnnnnnnnnnnnnnnnnnnnnnnnnnnnnnnnnnnnnnnnnnnnnnnnnnnnnnnnnnnnnnnnnnnnnnnnnnnnnnnnnnnnnnnnnnnnnnnnnnnnnnnnnnnnnnnnnnnnnnnnnnnnnnnnnnnnnnnnnnnnnnnnnnnnnnnnnnnnnnnnnnnnnnnnnnnnnnnnnnnnnnnnnnnnnnnnnnnnnnnnnnnnnnnnnnnnnnnnnnnnnnnnnnnnnnnnnnnnnnnnnnnnnnnnnnnnnnnnnnnnnnnnnnnnnnnnnnnnnnnnnnnnnnnnnnnnnnnnnnnnnnnnnnnnnnnnnnnnnnnnnnnnnnnnnnnnnnnnnnnnnnnnnnnnnnnnnnnnnnnnnnnnnnnnnnnnnnnnnnnnnnnnnnnnnnnnnnnnnnnnnnnnnnnnnnnnnnnnnnnnnnnnnnnnnnnnnnnnnnnnnnnnnnnnnnnnnnnnnnnnnnnnnnnnnnnnnnnnnnnnnnnnnnnnnnnnnnnnnnnnnnnnnnnnnnnnnnnnnnnnnnnnnnnnnnnnnnnnnnnnnnnnnnnnnnnnnnnnnnnnnnnnnnnnnnnnnnnnnnnnnnnnnnnnnnnnnnnnnnnnnnnnnnnnnnnnnnnnnnnnnnnnnnnnnnnnnnnnnnnnnnnnnnnnnnnnnnnnnnnnnnnnnnnnnnnnnnnnnnnnnnnnnnnnnnnnnnnnnnnnnnnnnnnnnnnnnnnnnnnnnnnnnnnnnnnnnnnnnnnnnnnnnnnnnnnnnnnnnnnnnnnnnnnnnnnnnnnnnnnnnnnnnnnnnnnnnnnnnnnnnnnnnnnnnnnnnnnnnnnnnnnnnnnnnnnnnnnnnnnnnnnnnnnnnnnnnnnnnnnnnnnnnnnnnnnnnnnnnnnnnnnnnnnnnnnnnnnnnnnnnnnnnnnnnnnnnnnnnnnnnnnnnnnnnnnnnnnnnnnnnnnnnnnnnnnnnnnnnnnnnnnnnnnnnnnnnnnnnnnnnnnnnnnnnnnnnnnnnnnnnnnnnnnnnnnnnnnnnnnnnnnnnnnnnnnnnnnnnnnnnnnnnnnnnnnnnnnnnnnnnnnnnnnnnnnnnnnnnnnnnnnnnnnnnnnnnnnnnnnnnnnnnnnnnnnnnnnnnnnnnnnnnnnnnnnnnnnnnnnnnnnnnnnnnnnnnnnnnnnnnnnnnnnnnnnnnnnnnnnnnnnnnnnnnnnnnnnnnnnnnnnnnnnnnnnnnnnnnnnnnnnnnnnnnnnnnnnnnnnnnnnnnnnnnnnnnnnnnnnnnnnnnnnnnnnnnnnnnnnnnnnnnnnnnnnnnnnnnnnnnnnnnnnnnnnnnnnnnnnnnnnnnnnnnnnnnnnnnnnnnnnnnnnnnnnnnnnnnnnnnnnnnnnnnnnnnnnnnnnnnnnnnnnnnnnnnnnnnnnnnnnnnnnnnnnnnnnnnnnnnnnnnnnnnnnnnnnnnnnnnnnnnnnnnnnnnnnnnnnnnnnnnnnnnnnnnnnnnnnnnnnnnnnnnnnnnnnnnnnnnnnnnnnnnnnnnnnnnnnnnnnnnnnnnnnnnnnnnnnnnnnnnnnnnnnnnnnnnnnnnnnnnnnnnnnnnnnnnnnnnnnnnnnnnnnnnnnnnnnnnnnnnnnnnnnnnnnnnnnnnnnnnnnnnnnnnnnnnnnnnnnnnnnnnnnnnnnnnnnnnnnnnnnnnnnnnnnnnnnnnnnnnnnnnnnnnnnnnnnnnnnnnnnnnnnnnnnnnnnnnnnnnnnnnnnnnnnnnnnnnnnnnnnnnnnnnnnnnnnnnnnnnnnnnnnnnnnnnnnnnnnnnnnnnnnnnnnnnnnnnnnnnnnnnnnnnnnnnnnnnnnnnnnnnnnnnnnnnnnnnnnnnnnnnnnnnnnnnnnnnnnnnnnnnnnnnnnnnnnnnnnnnnnnnnnnnnnnnnnnnnnnnnnnnnnnnnnnnnnnnnnnnnnnnnnnnnnnnnnnnnnnnnnnnnnnnnnnnnnnnnnnnnnnnnnnnnnnnnnnnnnnnnnnnnnnnnnnnnnnnnnnnnnnnnnnnnnnnnnnnnnnnnnnnnnnnnnnnnnnnnnnnnnnnnnnnnnnnnnnnnnnnnnnnnnnnnnnnnnnnnnnnnnnnnnnnnnnnnnnnnnnnnnnnnnnnnnnnnnnnnnnnnnnnnnnnnnnnnnnnnnnnnnnnnnnnnnnnnnnnnnnnnnnnnnnnnnnnnnnnnnnnnnnnnnnnnnnnnnnnnnnnnnnnnnnnnnnnnnnnnnnnnnnnnnnnnnnnnnnnnnnnnnnnnnnnnnnnnnnnnnnnnnnnnnnnnnnnnnnnnnnnnnnnnnnnnnnnnnnnnnnnnnnnnnnnnnnnnnnnnnnnnnnnnnnnnnnnnnnnnnnnnnnnnnnnnnnnnnnnnnnnnnnnnnnnnnnnnnnnnnnnnnnnnnnnnnnnnnnnnnnnnnnnnnnnnnnnnnnnnnnnnnnnnnnnnnnnnnnnnnnnnnnnnnnnnnnnnnnnnnnnnnnnnnnnnnnnnnnnnnnnnnnnnnnnnnnnnnnnnnnnnnnnnnnnnnnnnnnnnnnnnnnnnnnnnnnnnnnnnnnnnnnnnnnnnnnnnnnnnnnnnnnnnnnnnnnnnnnnnnnnnnnnnnnnnnnnnnnnnnnnnnnnnnnnnnnnnnnnnnnnnnnnnnnnnnnnnnnnnnnnnnnnnnnnnnnnnnnnnnnnnnnnnnnnnnnnnnnnnnnnnnnnnnnnnnnnnnnnnnnnnnnnnnnnnnnnnnnnnnnnnnnnnnnnnnnnnnnnnnnnnnnnnnnnnnnnnnnnnnnnnnnnnnnnnnnnnnnnnnnnnnnnnnnnnnnnnnnnnnnnnnnnnnnnnnnnnnnnnnnnnnnnnnnnnnnnnnnnnnnnnnnnnnnnnnnnnnnnnnnnnnnnnnnnnnnnnnnnnnnnnnnnnnnnnnnnnnnnnnnnnnnnnnnnnnnnnnnnnnnnnnnnnnnnnnnnnnnnnnnnnnnnnnnnnnnnnnnnnnnnnnnnnnnnnnnnnnnnnnnnnnnnnnnnnnnnnnnnnnnnnnnnnnnnnnnnnnnnnnnnnnnnnnnnnnnnnnnnnnnnnnnnnnnnnnnnnnnnnnnnnnnnnnnnnnnnnnnnnnnnnnnnnnnnnnnnnnnnnnnnnnnnnnnnnnnnnnnnnnnnnnnnnnnnnnnnnnnnnnnnnnnnnnnnnnnnnnnnnnnnnnnnnnnnnnnnnnnnnnnnnnnnnnnnnnnnnnnnnnnnnnnnnnnnnnnnnnnnnnnnnnnnnnnnnnnnnnnnnnnnnnnnnnnnnnnnnnnnnnnnnnnnnnnnnnnnnnnnnnnnnnnnnnnnnnnnnnnnnnnnnnnnnnnnnnnnnnnnnnnnnnnnnnnnnnnnnnnnnnnnnnnnnnnnnnnnnnnnnnnnnnnnnnnnnnnnnnnnnnnnnnnnnnnnnnnnnnnnnnnnnnnnnnnnnnnnnnnnnnnnnnnnnnnnnnnnnnnnnnnnnnnnnnnnnnnnnnnnnnnnnnnnnnnnnnnnnnnnnnnnnnnnnnnnnnnnnnnnnnnnnnnnnnnnnnnnnnnnnnnnnnnnnnnnnnnnnnnnnnnnnnnnnnnnnnnnnnnnnnnnnnnnnnnnnnnnnnnnnnnnnnnnnnnnnnnnnnnnnnnnnnnnnnnnnnnnnnnnnnnnnnnnnnnnnnnnnnnnnnnnnnnnnnnnnnnnnnnnnnnnnnnnnnnnnnnnnnnnnnnnnnnnnnnnnnnnnnnnnnnnnnnnnnnnnnnnnnnnnnnnnnnnnnnnnnnnnnnnnnnnnnnnnnnnnnnnnnnnnnnnnnnnnnnnnnnnnnnnnnnnnnnnnnnnnnnnnnnnnnnnnnnnnnnnnnnnnnnnnnnnnnnnnnnnnnnnnnnnnnnnnnnnnnnnnnnnnnnnnnnnnnnnnnnnnnnnnnnnnnnnnnnnnnnnnnnnnnnnnnnnnnnnnnnnnnnnnnnnnnnnnnnnnnnnnnnnnnnnnnnnnnnnnnnnnnnnnnnnnnnnnnnnnnnnnnnnnnnnnnnnnnnnnnnnnnnnnnnnnnnnnnnnnnnnnnnnnnnnnnnnnnnnnnnnnnnnnnnnnnnnnnnnnnnnnnnnnnnnnnnnnnnnnnnnnnnnnnnnnnnnnnnnnnnnnnnnnnnnnnnnnnnnnnnnnnnnnnnnnnnnnnnnnnnnnnnnnnnnnnnnnnnnnnnnnnnnnnnnnnnnnnnnnnnnnnnnnnnnnnnnnnnnnnnnnnnnnnnnnnnnnnnnnnnnnnnnnnnnnnnnnnnnnnnnnnnnnnnnnnnnnnnnnnnnnnnnnnnnnnnnnnnnnnnnnnnnnnnnnnnnnnnnnnnnnnnnnnnnnnnnnnnnnnnnnnnnnnnnnnnnnnnnnnnnnnnnnnnnnnnnnnnnnnnnnnnnnnnnnnnnnnnnnnnnnnnnnnnnnnnnnnnnnnnnnnnnnnnnnnnnnnnnnnnnnnnnnnnnnnnnnnnnnnnnnnnnnnnnnnnnnnnnnnnnnnnnnnnnnnnnnnnnnnnnnnnnnnnnnnnnnnnnnnnnnnnnnnnnnnnnnnnnnnnnnnnnnnnnnnnnnnnnnnnnnnnnnnnnnnnnnnnnnnnnnnnnnnnnnnnnnnnnnnnnnnnnnnnnnnnnnnnnnnnnnnnnnnnnnnnnnnnnnnnnnnnnnnnnnnnnnnnnnnnnnnnnnnnnnnnnnnnnnnnnnnnnnnnnnnnnnnnnnnnnnnnnnnnnnnnnnnnnnnnnnnnnnnnnnnnnnnnnnnnnnnnnnnnnnnnnnnnnnnnnnnnnnnnnnnnnnnnnnnnnnnnnnnnnnnnnnnnnnnnnnnnnnnnnnnnnnnnnnnnnnnnnnnnnnnnnnnnnnnnnnnnnnnnnnnnnnnnnnnnnnnnnnnnnnnnnnnnnnnnnnnnnnnnnnnnnnnnnnnnnnnnnnnnnnnnnnnnnnnnnnnnnnnnnnnnnnnnnnnnnnnnnnnnnnnnnnnnnnnnnnnnnnnnnnnnnnnnnnnnnnnnnnnnnnnnnnnnnnnnnnnnnnnnnnnnnnnnnnnnnnnnnnnnnnnnnnnnnnnnnnnnnnnnnnnnnnnnnnnnnnnnnnnnnnnnnnnnnnnnnnnnnnnnnnnnnnnnnnnnnnnnnnnnnnnnnnnnnnnnnnnnnnnnnnnnnnnnnnnnnnnnnnnnnnnnnnnnnnnnnnnnnnnnnnnnnnnnnnnnnnnnnnnnnnnnnnnnnnnnnnnnnnnnnnnnnnnnnnnnnnnnnnnnnnnnnnnnnnnnnnnnnnnnnnnnnnnnnnnnnnnnnnnnnnnnnnnnnnnnnnnnnnnnnnnnnnnnnnnnnnnnnnnnnnnnnnnnnnnnnnnnnnnnnnnnnnnnnnnnnnnnnnnnnnnnnnnnnnnnnnnnnnnnnnnnnnnnnnnnnnnnnnnnnnnnnnnnnnnnnnnnnnnnnnnnnnnnnnnnnnnnnnnnnnnnnnnnnnnnnnnnnnnnnnnnnnnnnnnnnnnnnnnnnnnnnnnnnnnnnnnnnnnnnnnnnnnnnnnnnnnnnnnnnnnnnnnnnnnnnnnnnnnnnnnnnnnnnnnnnnnnnnnnnnnnnnnnnnnnnnnnnnnnnnnnnnnnnnnnnnnnnnnnnnnnnnnnnnnnnnnnnnnnnnnnnnnnnnnnnnnnnnnnnnnnnnnnnnnnnnnnnnnnnnnnnnnnnnnnnnnnnnnnnnnnnnnnnnnnnnnnnnnnnnnnnnnnnnnnnnnnnnnnnnnnnnnnnnnnnnnnnnnnnnnnnnnnnnnnnnnnnnnnnnnnnnnnnnnnnnnnnnnnnnnnnnnnnnnnnnnnnnnnnnnnnnnnnnnnnnnnnnnnnnnnnnnnnnnnnnnnnnnnnnnnnnnnnnnnnnnnnnnnnnnnnnnnnnnnnnnnnnnnnnnnnnnnnnnnnnnnnnnnnnnnnnnnnnnnnnnnnnnnnnnnnnnnnnnnnnnnnnnnnnnnnnnnnnnnnnnnnnnnnnnnnnnnnnnnnnnnnnnnnnnnnnnnnnnnnnnnnnnnnnnnnnnnnnnnnnnnnnnnnnnnnnnnnnnnnnnnnnnnnnnnnnnnnnnnnnnnnnnnnnnnnnnnnnnnnnnnnnnnnnnnnnnnnnnnnnnnnnnnnnnnnnnnnnnnnnnnnnnnnnnnnnnnnnnnnnnnnnnnnnnnnnnnnnnnnnnnnnnnnnnnnnnnnnnnnnnnnnnnnnnnnnnnnnnnnnnnnnnnnnnnnnnnnnnnnnnnnnnnnnnnnnnnnnnnnnnnnnnnnnnnnnnnnnnnnnnnnnnnnnnnnnnnnnnnnnnnnnnnnnnnnnnnnnnnnnnnnnnnnnnnnnnnnnnnnnnnnnnnnnnnnnnnnnnnnnnnnnnnnnnnnnnnnnnnnnnnnnnnnnnnnnnnnnnnnnnnnnnnnnnnnnnnnnnnnnnnnnnnnnnnnnnnnnnnnnnnnnnnnnnnnnnnnnnnnnnnnnnnnnnnnnnnnnnnnnnnnnnnnnnnnnnnnnnnnnnnnnnnnnnnnnnnnnnnnnnnnnnnnnnnnnnnnnnnnnnnnnnnnnnnnnnnnnnnnnnnnnnnnnnnnnnnnnnnnnnnnnnnnnnnnnnnnnnnnnnnnnnnnnnnnnnnnnnnnnnnnnnnnnnnnnnnnnnnnnnnnnnnnnnnnnnnnnnnnnnnnnnnnnnnnnnnnnnnnnnnnnnnnnnnnnnnnnnnnnnnnnnnnnnnnnnnnnnnnnnnnnnnnnnnnnnnnnnnnnnnnnnnnnnnnnnnnnnnnnnnnnnnnnnnnnnnnnnnnnnnnnnnnnnnnnnnnnnnnnnnnnnnnnnnnnnnnnnnnnnnnnnnnnnnnnnnnnnnnnnnnnnnnnnnnnnnnnnnnnnnnnnnnnnnnnnnnnnnnnnnnnnnnnnnnnnnnnnnnnnnnnnnnnnnnnnnnnnnnnnnnnnnnnnnnnnnnnnnnnnnnnnnnnnnnnnnnnnnnnnnnnnnnnnnnnnnnnnnnnnnnnnnnnnnnnnnnnnnnnnnnnnnnnnnnnnnnnnnnnnnnnnnnnnnnnnnnnnnnnnnnnnnnnnnnnnnnnnnnnnnnnnnnnnnnnnnnnnnnnnnnnnnnnnnnnnnnnnnnnnnnnnnnnnnnnnnnnnnnnnnnnnnnnnnnnnnnnnnnnnnnnnnnnnnnnnnnnnnnnnnnnnnnnnnnnnnnnnnnnnnnnnnnnnnnnnnnnnnnnnnnnnnnnnnnnnnnnnnnnnnnnnnnnnnnnnnnnnnnnnnnnnnnnnnnnnnnnnnnnnnnnnnnnnnnnnnnnnnnnnnnnnnnnnnnnnnnnnnnnnnnnnnnnnnnnnnnnnnnnnnnnnnnnnnnnnnnnnnnnnnnnnnnnnnnnnnnnnnnnnnnnnnnnnnnnnnnnnnnnnnnnnnnnnnnnnnnnnnnnnnnnnnnnnnnnnnnnnnnnnnnnnnnnnnnnnnnnnnnnnnnnnnnnnnnnnnnnnnnnnnnnnnnnnnnnnnnnnnnnnnnnnnnnnnnnnnnnnnnnnnnnnnnnnnnnnnnnnnnnnnnnnnnnnnnnnnnnnnnnnnnnnnnnnnnnnnnnnnnnnnnnnnnnnnnnnnnnnnnnnnnnnnnnnnnnnnnnnnnnnnnnnnnnnnnnnnnnnnnnnnnnnnnnnnnnnnnnnnnnnnnnnnnnnnnnnnnnnnnnnnnnnnnnnnnnnnnnnnnnnnnnnnnnnnnnnnnnnnnnnnnnnnnnnnnnnnnnnnnnnnnnnnnnnnnnnnnnnnnnnnnnnnnnnnnnnnnnnnnnnnnnnnnnnnnnnnnnnnnnnnnnnnnnnnnnnnnnnnnnnnnnnnnnnnnnnnnnnnnnnnnnnnnnnnnnnnnnnnnnnnnnnnnnnnnnnnnnnnnnnnnnnnnnnnnnnnnnnnnnnnnnnnnnnnnnnnnnnnnnnnnnnnnnnnnnnnnnnnnnnnnnnnnnnnnnnnnnnnnnnnnnnnnnnnnnnnnnnnnnnnnnnnnnnnnnnnnnnnnnnnnnnnnnnnnnnnnnnnnnnnnnnnnnnnnnnnnnnnnnnnnnnnnnnnnnnnnnnnnnnnnnnnnnnnnnnnnnnnnnnnnnnnnnnnnnnnnnnnnnnnnnnnnnnnnnnnnnnnnnnnnnnnnnnnnnnnnnnnnnnnnnnnnnnnnnnnnnnnnnnnnnnnnnnnnnnnnnnnnnnnnnnnnnnnnnnnnnnnnnnnnnnnnnnnnnnnnnnnnnnnnnnnnnnnnnnnnnnnnnnnnnnnnnnnnnnnnnnnnnnnnnnnnnnnnnnnnnnnnnnnnnnnnnnnnnnnnnnnnnnnnnnnnnnnnnnnnnnnnnnnnnnnnnnnnnnnnnnnnnnnnnnnnnnnnnnnnnnnnnnnnnnnnnnnnnnnnnnnnnnnnnnnnnnnnnnnnnnnnnnnnnnnnnnnnnnnnnnnnnnnnnnnnnnnnnnnnnnnnnnnnnnnnnnnnnnnnnnnnnnnnnnnnnnnnnnnnnnnnnnnnnnnnnnnnnnnnnnnnnnnnnnnnnnnnnnnnnnnnnnnnnnnnnnnnnnnnnnnnnnnnnnnnnnnnnnnnnnnnnnnnnnnnnnnnnnnnnnnnnnnnnnnnnnnnnnnnnnnnnnnnnnnnnnnnnnnnnnnnnnnnnnnnnnnnnnnnnnnnnnnnnnnnnnnnnnnnnnnnnnnnnnnnnnnnnnnnnnnnnnnnnnnnnnnnnnnnnnnnnnnnnnnnnnnnnnnnnnnnnnnnnnnnnnnnnnnnnnnnnnnnnnnnnnnnnnnnnnnnnnnnnnnnnnnnnnnnnnnnnnnnnnnnnnnnnnnnnnnnnnnnnnnnnnnnnnnnnnnnnnnnnnnnnnnnnnnnnnnnnnnnnnnnnnnnnnnnnnnnnnnnnnnnnnnnnnnnnnnnnnnnnnnnnnnnnnnnnnnnnnnnnnnnnnnnnnnnnnnnnnnnnnnnnnnnnnnnnnnnnnnnnnnnnnnnnnnnnnnnnnnnnnnnnnnnnnnnnnnnnnnnnnnnnnnnnnnnnnnnnnnnnnnnnnnnnnnnnnnnnnnnnnnnnnnnnnnnnnnnnnnnnnnnnnnnnnnnnnnnnnnnnnnnnnnnnnnnnnnnnnnnnnnnnnnnnnnnnnnnnnnnnnnnnnnnnnnnnnnnnnnnnnnnnnnnnnnnnnnnnnnnnnnnnnnnnnnnnnnnnnnnnnnnnnnnnnnnnnnnnnnnnnnnnnnnnnnnnnnnnnnnnnnnnnnnnnnnnnnnnnnnnnnnnnnnnnnnnnnnnnnnnnnnnnnnnnnnnnnnnnnnnnnnnnnnnnnnnnnnnnnnnnnnnnnnnnnnnnnnnnnnnnnnnnnnnnnnnnnnnnnnnnnnnnnnnnnnnnnnnnnnnnnnnnnnnnnnnnnnnnnnnnnnnnnnnnnnnnnnnnnnnnnnnnnnnnnnnnnnnnnnnnnnnnnnnnnnnnnnnnnnnnnnnnnnnnnnnnnnnnnnnnnnnnnnnnnnnnnnnnnnnnnnnnnnnnnnnnnnnnnnnnnnnnnnnnnnnnnnnnnnnnnnnnnnnnnnnnnnnnnnnnnnnnnnnnnnnnnnnnnnnnnnnnnnnnnnnnnnnnnnnnnnnnnnnnnnnnnnnnnnnnnnnnnnnnnnnnnnnnnnnnnnnnnnnnnnnnnnnnnnnnnnnnnnnnnnnnnnnnnnnnnnnnnnnnnnnnnnnnnnnnnnnnnnnnnnnnnnnnnnnnnnnnnnnnnnnnnnnnnnnnnnnnnnnnnnnnnnnnnnnnnnnnnnnnnnnnnnnnnnnnnnnnnnnnnnnnnnnnnnnnnnnnnnnnnnnnnnnnnnnnnnnnnnnnnnnnnnnnnnnnnnnnnnnnnnnnnnnnnnnnnnnnnnnnnnnnnnnnnnnnnnnnnnnnnnnnnnnnnnnnnnnnnnnnnnnnnnnnnnnnnnnnnnnnnnnnnnnnnnnnnnnnnnnnnnnnnnnnnnnnnnnnnnnnnnnnnnnnnnnnnnnnnnnnnnnnnnnnnnnnnnnnnnnnnnnnnnnnnnnnnnnnnnnnnnnnnnnnnnnnnnnnnnnnnnnnnnnnnnnnnnnnnnnnnnnnnnnnnnnnnnnnnnnnnnnnnnnnnnnnnnnnnnnnnnnnnnnnnnnnnnnnnnnnnnnnnnnnnnnnnnnnnnnnnnnnnnnnnnnnnnnnnnnnnnnnnnnnnnnnnnnnnnnnnnnnnnnnnnnnnnnnnnnnnnnnnnnnnnnnnnnnnnnnnnnnnnnnnnnnnnnnnnnnnnnnnnnnnnnnnnnnnnnnnnnnnnnnnnnnnnnnnnnnnnnnnnnnnnnnnnnnnnnnnnnnnnnnnnnnnnnnnnnnnnnnnnnnnnnnnnnnnnnnnnnnnnnnnnnnnnnnnnnnnnnnnnnnnnnnnnnnnnnnnnnnnnnnnnnnnnnnnnnnnnnnnnnnnnnnnnnnnnnnnnnnnnnnnnnnnnnnnnnnnnnnnnnnnnnnnnnnnnnnnnnnnnnnnnnnnnnnnnnnnnnnnnnnnnnnnnnnnnnnnnnnnnnnnnnnnnnnnnnnnnnnnnnnnnnnnnnnnnnnnnnnnnnnnnnnnnnnnnnnnnnnnnnnnnnnnnnnnnnnnnnnnnnnnnnnnnnnnnnnnnnnnnnnnnnnnnnnnnnnnnnnnnnnnnnnnnnnnnnnnnnnnnnnnnnnnnnnnnnnnnnnnnnnnnnnnnnnnnnnnnnnnnnnnnnnnnnnnnnnnnnnnnnnnnnnnnnnnnnnnnnnnnnnnnnnnnnnnnnnnnnnnnnnnnnnnnnnnnnnnnnnnnnnnnnnnnnnnnnnnnnnnnnnnnnnnnnnnnnnnnnnnnnnnnnnnnnnnnnnnnnnnnnnnnnnnnnnnnnnnnnnnnnnnnnnnnnnnnnnnnnnnnnnnnnnnnnnnnnnnnnnnnnnnnnnnnnnnnnnnnnnnnnnnnnnnnnnnnnnnnnnnnnnnnnnnnnnnnnnnnnnnnnnnnnnnnnnnnnnnnnnnnnnnnnnnnnnnnnnnnnnnnnnnnnnnnnnnnnnnnnnnnnnnnnnnnnnnnnnnnnnnnnnnnnnnnnnnnnnnnnnnnnnnnnnnnnnnnnnnnnnnnnnnnnnnnnnnnnnnnnnnnnnnnnnnnnnnnnnnnnnnnnnnnnnnnnnnnnnnnnnnnnnnnnnnnnnnnnnnnnnnnnnnnnnnnnnnnnnnnnnnnnnnnnnnnnnnnnnnnnnnnnnnnnnnnnnnnnnnnnnnnnnnnnnnnnnnnnnnnnnnnnnnnnnnnnnnnnnnnnnnnnnnnnnnnnnnnnnnnnnnnnnnnnnnnnnnnnnnnnnnnnnnnnnnnnnnnnnnnnnnnnnnnnnnnnnnnnnnnnnnnnnnnnnnnnnnnnnnnnnnnnnnnnnnnnnnnnnnnnnnnnnnnnnnnnnnnnnnnnnnnnnnnnnnnnnnnnnnnnnnnnnnnnnnnnnnnnnnnnnnnnnnnnnnnnnnnnnnnnnnnnnnnnnnnnnnnnnnnnnnnnnnnnnnnnnnnnnnnnnnnnnnnnnnnnnnnnnnnnnnnnnnnnnnnnnnnnnnnnnnnnnnnnnnnnnnnnnnnnnnnnnnnnnnnnnnnnnnnnnnnnnnnnnnnnnnnnnnnnnnnnnnnnnnnnnnnnnnnnnnnnnnnnnnnnnnnnnnnnnnnnnnnnnnnnnnnnnnnnnnnnnnnnnnnnnnnnnnnnnnnnnnnnnnnnnnnnnnnnnnnnnnnnnnnnnnnnnnnnnnnnnnnnnnnnnnnnnnnnnnnnnnnnnnnnnnnnnnnnnnnnnnnnnnnnnnnnnnnnnnnnnnnnnnnnnnnnnnnnnnnnnnnnnnnnnnnnnnnnnnnnnnnnnnnnnnnnnnnnnnnnnnnnnnnnnnnnnnnnnnnnnnnnnnnnnnnnnnnnnnnnnnnnnnnnnnnnnnnnnnnnnnnnnnnnnnnnnnnnnnnnnnnnnnnnnnnnnnnnnnnnnnnnnnnnnnnnnnnnnnnnnnnnnnnnnnnnnnnnnnnnnnnnnnnnnnnnnnnnnnnnnnnnnnnnnnnnnnnnnnnnnnnnnnnnnnnnnnnnnnnnnnnnnnnnnnnnnnnnnnnnnnnnnnnnnnnnnnnnnnnnnnnnnnnnnnnnnnnnnnnnnnnnnnnnnnnnnnnnnnnnnnnnnnnnnnnnnnnnnnnnnnnnnnnnnnnnnnnnnnnnnnnnnnnnnnnnnnnnnnnnnnnnnnnnnnnnnnnnnnnnnnnnnnnnnnnnnnnnnnnnnnnnnnnnnnnnnnnnnnnnnnnnnnnnnnnnnnnnnnnnnnnnnnnnnnnnnnnnnnnnnnnnnnnnnnnnnnnnnnnnnnnnnnnnnnnnnnnnnnnnnnnnnnnnnnnnnnnnnnnnnnnnnnnnnnnnnnnnnnnnnnnnnnnnnnnnnnnnnnnnnnnnnnnnnnnnnnnnnnnnnnnnnnnnnnnnnnnnnnnnnnnnnnnnnnnnnnnnnnnnnnnnnnnnnnnnnnnnnnnnnnnnnnnnnnnnnnnnnnnnnnnnnnnnnnnnnnnnnnnnnnnnnnnnnnnnnnnnnnnnnnnnnnnnnnnnnnnnnnnnnnnnnnnnnnnnnnnnnnnnnnnnnnnnnnnnnnnnnnnnnnnnnnnnnnnnnnnnnnnnnnnnnnnnnnnnnnnnnnnnnnnnnnnnnnnnnnnnnnnnnnnnnnnnnnnnnnnnnnnnnnnnnnnnnnnnnnnnnnnnnnnnnnnnnnnnnnnnnnnnnnnnnnnnnnnnnnnnnnnnnnnnnnnnnnnnnnnnnnnnnnnnnnnnnnnnnnnnnnnnnnnnnnnnnnnnnnnnnnnnnnnnnnnnnnnnnnnnnnnnnnnnnnnnnnnnnnnnnnnnnnnnnnnnnnnnnnnnnnnnnnnnnnnnnnnnnnnnnnnnnnnnnnnnnnnnnnnnnnnnnnnnnnnnnnnnnnnnnnnnnnnnnnnnnnnnnnnnnnnnnnnnnnnnnnnnnnnnnnnnnnnnnnnnnnnnnnnnnnnnnnnnnnnnnnnnnnnnnnnnnnnnnnnnnnnnnnnnnnnnnnnnnnnnnnnnnnnnnnnnnnnnnnnnnnnnnnnnnnnnnnnnnnnnnnnnnnnnnnnnnnnnnnnnnnnnnnnnnnnnnnnnnnnnnnnnnnnnnnnnnnnnnnnnnnnnnnnnnnnnnnnnnnnnnnnnnnnnnnnnnnnnnnnnnnnnnnnnnnnnnnnnnnnnnnnnnnnnnnnnnnnnnnnnnnnnnnnnnnnnnnnnnnnnnnnnnnnnnnnnnnnnnnnnnnnnnnnnnnnnnnnnnnnnnnnnnnnnnnnnnnnnnnnnnnnnnnnnnnnnnnnnnnnnnnnnnnnnnnnnnnnnnnnnnnnnnnnnnnnnnnnnnnnnnnnnnnnnnnnnnnnnnnnnnnnnnnnnnnnnnnnnnnnnnnnnnnnnnnnnnnnnnnnnnnnnnnnnnnnnnnnnnnnnnnnnnnnnnnnnnnnnnnnnnnnnnnnnnnnnnnnnnnnnnnnnnnnnnnnnnnnnnnnnnnnnnnnnnnnnnnnnnnnnnnnnnnnnnnnnnnnnnnnnnnnnnnnnnnnnnnnnnnnnnnnnnnnnnnnnnnnnnnnnnnnnnnnnnnnnnnnnnnnnnnnnnnnnnnnnnnnnnnnnnnnnnnnnnnnnnnnnnnnnnnnnnnnnnnnnnnnnnnnnnnnnnnnnnnnnnnnnnnnnnnnnnnnnnnnnnnnnnnnnnnnnnnnnnnnnnnnnnnnnnnnnnnnnnnnnnnnnnnnnnnnnnnnnnnnnnnnnnnnnnnnnnnnnnnnnnnnnnnnnnnnnnnnnnnnnnnnnnnnnnnnnnnnnnnnnnnnnnnnnnnnnnnnnnnnnnnnnnnnnnnnnnnnnnnnnnnnnnnnnnnnnnnnnnnnnnnnnnnnnnnnnnnnnnnnnnnnnnnnnnnnnnnnnnnnnnnnnnnnnnnnnnnnnnnnnnnnnnnnnnnnnnnnnnnnnnnnnnnnnnnnnnnnnnnnnnnnnnnnnnnnnnnnnnnnnnnnnnnnnnnnnnnnnnnnnnnnnnnnnnnnnnnnnnnnnnnnnnnnnnnnnnnnnnnnnnnnnnnnnnnnnnnnnnnnnnnnnnnnnnnnnnnnnnnnnnnnnnnnnnnnnnnnnnnnnnnnnnnnnnnnnnnnnnnnnnnnnnnnnnnnnnnnnnnnnnnnnnnnnnnnnnnnnnnnnnnnnnnnnnnnnnnnnnnnnnnnnnnnnnnnnnnnnnnnnnnnnnnnnnnnnnnnnnnnnnnnnnnnnnnnnnnnnnnnnnnnnnnnnnnnnnnnnnnnnnnnnnnnnnnnnnnnnnnnnnnnnnnnnnnnnnnnnnnnnnnnnnnnnnnnnnnnnnnnnnnnnnnnnnnnnnnnnnnnnnnnnnnnnnnnnnnnnnnnnnnnnnnnnnnnnnnnnnnnnnnnnnnnnnnnnnnnnnnnnnnnnnnnnnnnnnnnnnnnnnnnnnnnnnnnnnnnnnnnnnnnnnnnnnnnnnnnnnnnnnnnnnnnnnnnnnnnnnnnnnnnnnnnnnnnnnnnnnnnnnnnnnnnnnnnnnnnnnnnnnnnnnnnnnnnnnnnnnnnnnnnnnnnnnnnnnnnnnnnnnnnnnnnnnnnnnnnnnnnnnnnnnnnnnnnnnnnnnnnnnnnnnnnnnnnnnnnnnnnnnnnnnnnnnnnnnnnnnnnnnnnnnnnnnnnnnnnnnnnnnnnnnnnnnnnnnnnnnnnnnnnnnnnnnnnnnnnnnnnnnnnnnnnnnnnnnnnnnnnnnnnnnnnnnnnnnnnnnnnnnnnnnnnnnnnnnnnnnnnnnnnnnnnnnnnnnnnnnnnnnnnnnnnnnnnnnnnnnnnnnnnnnnnnnnnnnnnnnnnnnnnnnnnnnnnnnnnnnnnnnnnnnnnnnnnnnnnnnnnnnnnnnnnnnnnnnnnnnnnnnnnnnnnnnnnnnnnnnnnnnnnnnnnnnnnnnnnnnnnnnnnnnnnnnnnnnnnnnnnnnnnnnnnnnnnnnnnnnnnnnnnnnnnnnnnnnnnnnnnnnnnnnnnnnnnnnnnnnnnnnnnnnnnnnnnnnnnnnnnnnnnnnnnnnnnnnnnnnnnnnnnnnnnnnnnnnnnnnnnnnnnnnnnnnnnnnnnnnnnnnnnnnnnnnnnnnnnnnnnnnnnnnnnnnnnnnnnnnnnnnnnnnnnnnnnnnnnnnnnnnnnnnnnnnnnnnnnnnnnnnnnnnnnnnnnnnnnnnnnnnnnnnnnnnnnnnnnnnnnnnnnnnnnnnnnnnnnnnnnnnnnnnnnnnnnnnnnnnnnnnnnnnnnnnnnnnnnnnnnnnnnnnnnnnnnnnnnnnnnnnnnnnnnnnnnnnnnnnnnnnnnnnnnnnnnnnnnnnnnnnnnnnnnnnnnnnnnnnnnnnnnnnnnnnnnnnnnnnnnnnnnnnnnnnnnnnnnnnnnnnnnnnnnnnnnnnnnnnnnnnnnnnnnnnnnnnnnnnnnnnnnnnnnnnnnnnnnnnnnnnnnnnnnnnnnnnnnnnnnnnnnnnnnnnnnnnnnnnnnnnnnnnnnnnnnnnnnnnnnnnnnnnnnnnnnnnnnnnnnnnnnnnnnnnnnnnnnnnnnnnnnnnnnnnnnnnnnnnnnnnnnnnnnnnnnnnnnnnnnnnnnnnnnnnnnnnnnnnnnnnnnnnnnnnnnnnnnnnnnnnnnnnnnnnnnnnnnnnnnnnnnnnnnnnnnnnnnnnnnnnnnnnnnnnnnnnnnnnnnnnnnnnnnnnnnnnnnnnnnnnnnnnnnnnnnnnnnnnnnnnnnnnnnnnnngatcacagaggctgggctgctccccaccctctgcacacctcctgcttctaacagcagagctgccaggccaggccctcaggcaagggctctgaagtcagggtcacctacttgccagggccgatcttggtgccatccagggggcctctacaaggataatctgacctgcagggtcgaggagttgacggtgctgagttccctgcactctcagtagggacaggccctatgctgccacctgtacatgctatctgaaggacagcctccagggcacacagaggatggtatttacacatgcacacatggctactgatggggcaagcacttcacaacccctcatgatcacgtgcagcagacaatgtggcctctgcagagggggaacggagaccggaggctgagactggcaaggctggacctgagtgtcgtcacctaaattcagacggggaactgcccctgcacatagtgaacggctcactgagcaaaccccgagtcccgaccaccgcctcagtgtggtctagctcctcacctgcttccatcctccctggtgcggggtgggcccagtgatatcagctgcctgctgttccccagatgtgccaagtgcattcttgtgtgcttgcatctcatggaacgccatttccccagacatccctgtggctggctcctgatgcccgaggcccaagtgtctgatgctttaaggcacatcaccccactcatgcttttccatgttctttggccgcagcaaggccgctctcactgcaaagttaactctgatgcgtgtgtaacacgacatcctcctcccagtcgcccctgtagctcccctacctccaagagcccagcccttgcccacagggccatactccacgtgcagagcagcctcagcactcaccgggcacgagcgagcctgtgtggtgcgcagggatgagaaggcagaggcgcgactggggttcatgaggaagggcaggaggagggtgtgggatggtggaggggtttgagaaggcagaggcgcgactggggttcatgaggaaagggagggggaggatgtgggatggtggaggggctgcagactctgggctagggaaagctgggatgtctctaaaggttggaatgaatggcctagaatccgacccaataagccaaagccacttccaccaacgttagaaggccttggcccccagagagccaatttcacaatccagaagtccccgtgccctaaagggtctgccctgattactcctggctccttgtgtgcagggggctcaggcatggcagggctgggagtaccagcaggcactcaagcgacttaagtgttccatgacagactggtatgaaggtggccacaattcagaaagaaaaaagaagagcaccatctccttccagtgaggaagcggggccaccacccagcgtgtgctccatcttttctggctggggagaggccttcatctgctgtaaagggtcctccagcacaagctgtcttaattgaccctagttcccagggcagcctcgttctgccttgggtgctgacacgaccttcggtaggtgcataagctctgcattcgaggtccacaggggcagtgggagggaactgagactggggagggacaaaggctgctctgtcctggtgctcccacaaaggagaagggctgatcactcaaagttgcgaacaccaagctcaacaatgagccctggaaaatttctggaatggattattaaacagagagtctgtaagcacttagaaaaggccacggtgagtcccaggggccagcactgctcgaaatgtacagcatttctctttgtaacaggattattagcctgctgtgcccggggaaaacatgcaccacagcgcatctcgagtcagcaggattttgacggcttctaacaaaatcttgtagacaagatggagctatgggggttggaggagagaacatataggaaaaatcagagccaaatgaaccacagccccaaagggcacagttgaacaatggactgattccagccttgcacggagggatctggcagagtccatccagttcattcaacacctggttagaaaactggggccagcacacaggggaagggtaagctggtttcatgatcgaatcaaggctcagacaatttttaaaggccagagggtagactgcaatcaccaagatgaaatttacaaggaacaaatgtgaagcccaacatttaggttttaaaaatcaagcgtataaatacagaaggtggagggaacttgctttagacacagttcaggtgaagaaagacctggaaacttctgttaactataagctcagtaggggctaaaagcatgttaatcggcataaaaaggcaatgagatcttagggcacacagctccccgcccctcttctgcccttcatccttctttcaatcagcagggaccgtgcactctcttggagccaccacagaaaacagaggtgcatccagcaccacagaaaacagagccaccacagaaaacagagggtgactgtcatcccctccagtctctgcacactcccagctgcagcagagcaggaggagagagcacagcctgcaatgctaatttgccaggagctcacctgcctgcgtcactgggcacagacgccagtgaggccagaggccgggctgtgctggggcctgagccgggtggtggggagagagtctctcccctgcccctgtctcttccgtgcaggaggagcatgtttaaggggacgggttcaaagctggtcacatccccaccgaaaaagcccatggacaacgaaaagcccactagcttgtccagtgccacaggaggggcaagtggaggaggagaggtggcggtgctccccactccactgccagtcgtcactggctctcccttcccttcatcctcgttccctatctgtcaccatttcctgtcgtcgtttcctctgaatgtctcaccctgccctccctgcttgcaagtcccctgtctgtagcctcacccctgtcgtatcctgactacaataacagcttctgggtgtccctggcatccactctctctcccttcttgtcccttctgtgacggatgcctgaggaaccttccccaaactcttctgtcccatccctgccctgctcaaaatccaatcacagctccctaacacgcctgaatcaacttgaagtcctgtcttgagtaatccgtgggccctaactcactcatcccaactcttcactcactgccctgccccacaccctgccagggagcctcccgtggcaccgtggggacacaaaggaaccagggcaaagctccctcagccccattcaaagaggcctggcccacaggctcacggaaagttagcctctcatgccccgagagctgagtgcaagggagaggcagcgctgtctgtgcttcccatgcagaagcacccccctcccacccctgtgcaggccggccttcgcggcagaccaccatacaccacgttccaagccacactgaggcctccctccaagcctgcagcccccatttccagaccctgccagggcaacctgcatatccacctccctaccctgcccccctcttccaggagtctgccctatgtggagtaagcacgtggttttcctcttcagcaactatttcctttttactcaagcaatggccccatttcccttggggaatccatctctctcgcaggcttagtcccagagcttcaggtggggctgcccacagagctcctcagtctaagccaagtggtgtgtcatagtcccctggccccattaatggattctgggatagacatgaggaccaagccaggtgggatgagtgagtgtggcttctggaggaagtggggacacaggacagcattctttcctgctggacctgaccctgtgtcatgtcaccttgctaccacgagagcatggcctgtctgggaatgcagccagacccaaagaagcaaactgacatggaaggaaagcaaaaccaggccctgaggacatcattttagcccttactccgaaggctgctctactgattggttaatttttgcttagcttggtctggggagttctgacaggcgtgccaccaattcttaccgatttctctccactctagaccctgagaagcccacgcggttcatgctagcaattaacaatcaatctcgccctatgtgttcccattccagcctctaggacacagtggcagccacataattggtatctcttaaggtccagcacgaggtggagcacatggtggagagacagatgcagtgacctggaacccaggagtgagggagccaggactcaggcccaaggctcctgagaggcatctggccctccctgcgctgtgccagcagcttggagaacccacactcaatgaacgcagcactccactacccaggaaatgccttcctgccctctcctcatcccatccctgggcaggggacatgcaactgtctacaaggtgccaagtaccaggacaggaaaggaaagacgccaaaaatccagcgctgccctcagagaagggcaaccacgcagtccccatcttggcaaggaaacacaatttccgagggaatggttttggcctccattctaagtgctggacatggggtggccataatctggagctgatggctcttaaagacctgcatcctcttccctaggtgtccctcgggcacatttagcacaaagataagcacaaaaggtgcatccagcactttgttactattggtggcaggtttatgaatggcaaccaaaggcagtgtacgggtcaagattatcaacagggaagagatagcatttcctgaaggcttcctaagtgccaggcactgttccattcctttgcatgttttgattaatttaatatttaaaataattctaccaggaagctaccattattaccacaacttcacaaatgagaacaccgaggcttagaggggttgggttgcccaaggttacagaggaagaaaacaggggagctggatctgagccaaggcatcaactccaaggtaacccctcagtcacttcactgtgtgtcccctggttactgggacattcttgacaaactcggggcaagccggtgagtcagtgggggaggactttcaggaagaggtgggttcccagttggtgacagaagaggaggctgcaaagtgaaggagcaggggctccaggtctggcgacaaccagggaagggacagggcagggatggcttggaccacgagaggcacctgagtcaggcagtcacatacttcccactggggtctaccatgtgaggcatggtgtgggatcctgggaaggagaccaagcctcatttcagtttgcttatggccaaagacaggacctgtgtacccgacaacccctgggacctttaccaaaaaaagagcaaacaccattcactcactcatgttagataaacactgagtgaagtcactggagcccaaggactgtgcgaggtcagcactgccaatacaagaagctgcagccctccagctcgcctccctcaatggccactccgtgctccagccatgctggcttccttttaggtcctccacctccaggctgtagttcatgtgcttctttctggaatgttcttcccaacctacccactcaaccctcagactttaccataaatgtcatttcctcacgtctgccttccctgacctgagaccaagccaggcttcccatgacgagcctcacagtaccccatctcccctgaacagatgcagtaataacctacataacccggggccatgatctatggctttgaatcctggctctgtcactaggccaggtctctcagcccttctgtgcctcagtttcctcatctataaaatgagatgacggcagtgcctgctcatgaagtgtgagttaatgcactcaaatcaatggttgtgcacggtttatatgaatattagtgattacaaaatattatcaatagaccttgtcacaactgttattgaagaactaatcatctattgcttatttaggtctttctctcctgccagaatgtgcgctccaggtggagaggtatgttgccttatccgtggctggatatatagagattcccacactgccttgcacacgagcactgctgggtaaatatttgttggctgcaggaaaacgtgaaggaataggccctccaatgggaggaaaagcatgagttgtgagagcagagccaccacaggaaaccaggaggctaagtggggtggaagggagtgagctcttggactcccaggagtaaaagcttccaagttgggctctcacttcagcccctcccacacagggaagccagatgggttccccaggaccgggattccccaagggggctgctcccagagggtgtgttgctgggattgcccaggacagggatggccctctcatcaggtgggggtgagtggcagcacccacctgctgaagatgtctccagagaccttctgcaggtactgcagggcatccgccatctgctggacggcctcctctcgccgcaggtctggctggatgaagggcacggcataggtctgacctgccagggagtgctgcatcctcacaggagtcatggtgcctgtgggtcggagccggagcgtcagagccacccacgaccaccggcacgcccccaccacagggcagcgtggtgttgagacaacacagccctcatcccaactatgcacatagcttcagcctgcacagataggggagtaggggacagagcatttgctgagaggccaggagcgcatagatgggactctgctgatgcctgctgagtgaatgagggaaagggcagggcccgggactggggaatctgtagggtcaatggaggagttcagagaaggtgcaacatttctgaccccctacaaggtgcttgctacctgccaggcaccctttccataccttgtctcagttcagctccccaccttggataaacaagaaaccttggttgcagaggaaaaaagaggctggaaacaaaggggtagaaatggggtagcaggggagattgcctgatcaactgccaaatggtacacagttctggaaaagcacaaaaaatgtgcacacacgggttcttcccactttaacccctgaggaatctgaggcctgctcctgaaacagactgggcagtggctagtgactctaggtataggagtatccagccctgctcacccaggctagagcttagggggacaagaggaaagaggtgcctgtgggggtggaggacaggaaggaaaaacactcctggaattgcaaagtgagggcagagtctatttatattgggtttaattaactcctctccctggtgccactaaagcagcaatcacactgcagacagcactgatttgattggcaagagatgcaccaggcagaatattaagggaccaggcccctataaataggcctaatcacagcccctcactggaaaatggtaaggaagacattaatcaggcctggcactgtgccctagacctgctcccctaggcactacagtggggcccttggttgcaacacaagtaggtagggatggatgagtgtggcatgaagggcctaggagatttcacttgggtttaaaatgctgtgaccttgagtaagttgccgtctctgaatctgatcctttcgatttcccattctccaaactgagaactagcactgctgagacgtggttatttccaataataatttgtatattttacataacgcaccacaccaacatcttcacccagttggagcctactcctttgctcccgctgctggcttccccagccctcccttctgccctcctcaggccagcacttttcagtgagttcctcctttgcatacaggctttccagatctgtacttgccttgaatactcatcagagcccaggagttactcctcacctcccacttatttttcctcccatcaaataactaaagcatggccagctgatgcccagccaactgagaaacccaaccctctgagaccagcacacccctttcaagcatgttcctccctccccttctttgtatttatactgatgcaagtttgctggctgtcctaacttatttctgtgcctcagttctcccatatgtaagatcacaaagggggtaaagatgcaagatatttcctgtgcacatcttcagatgaatttcttgttagtgtgtgtgtgtttgctcacacatatgcgtgaaagaagagtacatacacagatctcctcaaaaaggaggcagcaagcccgttcaagaatgggactgaatacacctgatgagtggtttactttctgtctgcaaacatctactgatcatctgttaggtgcaggccatgatcacaacaaagacgaataagacactacactagccagggagagtctcaaaaacaactaaactcaaattaaattcattctactccagtcatgggtacaaagctaaggagtgacaaatccctcttggagttagggg[134 bp omitted]catggtgaaactccatctctactaaaaatacaaaattagccaggcgtggtggtgcatgcctgtaatccccgctactcgggaggctgaggaaggagaatcacttgaaccgggaaggtggaggttgcagtgtgccaagatcgcgccatggcactccagcctaggcaacgagggtgaaccaggtccaggaagaaggtgcaaagacagcattccaggtaaaagaaacagcttgaacaaaaagtgtgtaggggaaccgcaagcggtcttgagtgctgagggtacaatcatccttggggaagtactagaagaaagaatgataaacagaggccagtttgttaaaaacactcaaaattaaagctaggagtttggacttgtggcaggaatgaaatccttagacctgtgctgtccaatatggtagccaccaggcacatgcagccactgagcacttgaaatgtggatagtctgaattgagatgtgccataagtgtaaaatatgcaccaaatttcaaaggctagaaaaaaagaatgtaaaatatcttattattttatattgattacgtgctaaaataaccatatttgggatatactggattttaaaaatatatcactaatttcatctgtttctttttacttttagaaatcacatatgtgacttaaatatttcttttctttttctttcctctcactcagcgtcctgtgattccaaagaaatgagtctctgctgtttttgggcagcagatatcctagaatggactctgacctaagcatcaaaattaatcatcataacgttatcattttatggccccttcttcctatatctggtagcttttaaatgatgaccatgtagataatctttattgtccctctttcagcagacggtattttcttatgctacagtatgactgctaataatacctacacatgttagaaccattctgactcctcaagaatctcatttaactcttattatcagtgaatttatcatcatcccctattttacataaggaaatggggttagaaagaccaaataacattttttcaacatcaaaacactagcttgagatcaagcccagacttggatctgtcgtctgaattccaagctttttgttatttattgatatgttttgttgttttcatgcaataatgcaaatcttagcccaaacattttgttagtagtaccaactgtaagtcaccttatcttcatactttgtctttatgtaaacctaaattagatctgtttttgatactgagggaaaaacaagggaatctaacactaaccagcccgtagtgtgtggtcaacactttcgttactttagtatacatcaccccaattgtttgtcttcaccacacactttggagttaggtagtagtatctatttttacaaataagaaaacccaggcacaaaggggttgattagcaattatcttttgaaaagcctgtagttgctcatctgaagaagtgacggaccacctcttatttagtggacagacagtaactagttgagaagacaggggattttgttggcggaaaaaaaaatttatcaaaagtcgtcttctatcagggagttttatgagaaaccctagctcctcagttccacagtgggtaactgtaattcattctaggtctgcgatatttcctgcctatccattttgttaactcttcaatgcattccacaaatacctaagtattctttaataatggtgggttttttttttttttgcatctatgaagttttttcaaattctttttaagtgacaaaacttgtacatgtgtatcgctcaatatttctagtcgacagcactgctttcgagaatgtaaaccgtgcactcccaggaaaatgcagacacagcacgcctctttgggaccgcggtttatactttcgaagtgctcggagcccttcctccagaccgttctcccacaccccgctccagggtctctcccggagttacaagcctcgctgtaggccccgggaacccaacgcggtgtcagagaagtggggtcccctacgagggaccaggagctccgggcgggcagcagctgcggaagagccgcgcgaggcttcccagaacccggcaggggcgggaagacgcaggagtggggaggcggaaccgggaccccgcagagcccgggtccctgcgccccacaagccttggcttccctgctagggccgggcaaggccgggtgcagggcgcggctccagggaggaagctccggggcgagcccaagacgcctcccgggcggtcggggcccagcggcggcgttcgcagtggagccgggcaccgggcagcggccgcggaacaccagcttggcgcaggcttctcggtcaggaacggtcccgggcctcccgcccgcctccctccagcccctccgggtcccctacttcgccccgccaggcccccacgaccctacttcccgcggccccggacgcctcctacctgcgagccgccctcccggaagctcccgccgccgcttccgctctgccggagccgctgggtcctagccccgccgcccccagtccgcccgcgcctccgggtcctaacgccgccgctcgccctccgctgcgccctccccgagcgcggctccaggaccccgtcgacccggagcgctgtcctgtcgggccgagtcgcgggcctgggcacggaactcacgctcactccgagctcccgacgtgcacacggctcccatgcgttgtcttccgagcgtcaggccgcccctacccgtgctttctgctctgcagaccctcttcctagacctccgtcctttgtcccatcgctgccttcccctcaagctcagggccaagctgtccgccaacctcggctcctccgggcagccctcgcccggggtgcgccccggggcaggacccccagcccacgcccagggcccgcccctgccctccagccctacgccttgacccgctttcctgcgtctctcagcctacctgaccttgtctttacctctgtgggcagctcccttgtgatctgcttagttcccacccccctttaagaattcaatagagaagccagacgcaaaactacagatatcgtatgagtccagttttgtgaagtgcctagaatagtcaaaattcacagagacagaagcagtggtcgccaggaatggggaagcaaggcggagttgggcagctcgtgttcaatgggtagagtttcaggctggggtgatggaagggtgctggaaatgagtggtagtgatggcggcacaacagtgtgaatctacttaatcccactgaactgtatgctgaaaaatggtttagacggtgaattttaggttatgtatgttttaccacaatttttaaaaagctagtgaaaagctggtaaaaagaaagaaaagaggcttttttaaaaagttaaatatataaaaagagcatcatcagtccaaagtccagcagttgtccctcctggaatccgttggcttgcctccggcatttttggcccttgccttttagggttgccagattaaaagacaggatgcccagctagtttgaattttagataaacaacgaataatttcgtagcataaatatgtcccaagcttagtttgggacatacttatgctaaaaaacattattggttgtttatctgagattcagaattaagcattttatattttatttgctgcctctggccaccctactctcttcctaacactctctccctctcccagttttgtccgccttccctgcctcctcttctgggggagttagatcgagttgtaacaagaacatgccactgtctcgctggctgcagcgtgtggtccccttaccagaggtaaagaagagatggatctccactcatgttgtagacagaatgtttatgtcctctccaaatgcttatgttgaaaccctaacccctaatgtgatggtatgtggagatgggcctttggtaggtaattacggttagatgaggtcatggggtggggccctcattatagatctggtaagaaaagagagcattgtctctgtgtctccctctctctctctctctctctctctctcatttctctctatctcatttctctctctctctctatctcatttttctctctctctctttctctcctctgtcttttcccaccaagtgaggatgcgaagagaaggtggctgtctgcaaaccaggaagagagccctcaccgggaacccgtccagctgccaccttgaacttggacttccaagcctccagaactgtgagggataaatgtatgattttaaagtcgcccagtgtgtggtattttgttttgactaatacaacctgaaaacatttttccctcactccacctgagcaatatctgagtggcttaaggtactcaggacacaacaaaggagaaatgtcccatgcacaaggtgcacccatgcctgggtaaagcagcctggcacagagggaagcacacaggctcagggctctgctattcattctttgtgtgaccctgggcaagccatgaatggagcttcagtcaccccatttgtaatgggatttaattgtgcttgccctgcctccttttgagggctgtagagaaaagatgtcaaagtattttgtaatctggctgggcgtggtggctcatgcctgtaatcctagcactttggtaggctgacgcgagaggactgcttgagcccaagagtttgagatcagcctgggcaatattgtgagattccatctctacaaaaataaaataaaatagccagtcatggtgtcacacacctgtagtcccagctacatgggaggctgaggcgggaggatcacttgagcttgggagatcgaggctgcagtgagctatgattgtaccactgcactccaggctgggcgacagagagagaccctgtctcagaaaaaaaaaaaaaagtactttgtaatctgtaaggtttatttcaacacacacaaaaaaagtgtatatgctccacgatgcctgtgaatatacacacacaccacatcatataccaagcctggctgtgtcttctcacaaatgcactgctaggcaccacccccagttctagaatcacaccagccagttcaccctccagatggttcaccctcaacttcataaaagttccctacctaatctactgacaggctcatccccgacctaattttaaagatttcctaggagctgcagtgggaatcctggacctcagcctggacaaagaacagctgcaggtcattctcatgtgtggacacagaagctctgcctgcctttgctggccagctgggctgagcgggcctgggaattaaggctgcagggttggtcccaggcagtcttgctgaagcttgccacatcccccagcctcctggatttgccaggatccaagagcatggactttaggaattcctggtggaggagtgaagaaaatgtgacagggtgtcctaagccccgatctacaggaagaaaactggaaataagactgaggacttagtttaagatgttcctactcagcctctagcttttgtgctacagttctgggaacagactcctctctcctgaaaaccacttccctccgcagcattagatttcaccaagatgtcttgcttgtgggaaagacttccaaggatgcctggagagaggaggatggaaatgtcctgctctctaaacagatagacagatgcagccagacagaaaatagtttatcttgctgaggtttctaatgtatttgaaagaggcctgggtctagaagtctacccagagggctctgtgttgtgcacgcaaagataagaaccttccctgtgggagttccagagccagttttcataaacacccatcggtgactgtgttcagagtgagttcacaccatcctgacctgccctgagttagaccttacatggtcttcctcctctaggaagcctctgcagcccaggaacctccccttatcggaaatgaacagcatttgaagcttcaccagacagaccagacagcttagccctcgtgttgtgccatgtgggttgttctctgagaggcaggagagcatagtggttactaggaagggaaggactttgggactagactgcctcggctggagtcctctttctgcttcatagccacgtgatcctaggcatgttacctgtgcctcagttttcactctgtcaatatgtaataactgaatctgtctttgtggtgaggattcagtgagttaacatatttgaagtgcttaaaaatgaggcttgtgtccatagattaatgagtgaatacacaaatggtgatatggacatacagtggagtattagtcataaaaaggaaggcagagctgatccatggcaccatgtgacagaacctcaaaagcattaggttaagtggaagaagccagacacaggtcacctattgtgtaattccatttataggaaatatacagaatatgtaaatccgtggagaaagaaagccgatttccaggggctaaggggaggggagaatgggaagtggctgcttcatgggtacaaggtttcattttgagctgatgaaaatgttttggaactacatagagatagtgttggcacaacatggtgaatgtactgaatgccactgattgttcactttaaaatggtcaaacttatatgaatttcacctccattaaaaaaaaaaaaaaaggaccagatgtggttgctcacacccataatcccaacactttggaaaaaggtgaaagtttttttttctttttttttttatatacttaagttctagggtacatgtgcataatgtgcaggttggatacatagatatgcgtgtgccatgttggtttgctgcacccatcaacttgtcatttacattaggtatttcttctaatgctatccctcccccagccccccacccactgacaggccccagtgtatgatgttctctgccccatgtccaagcgttctcattgttcaattcccacctgtgagtgagaacatgcagtgtttggttttctgtctttgtgatagtttgctcagaatgatggtttccagcttcatccatgtccctgcaaaggacatgaactcatcctttttaatggctgcatagtatcccatggtatatatgtgccacattctcttaatccagtctgtcattgatggacatttgggttggttcaaagtctttgctattgtgaatactgccacaataaacatacatgtgcatgtgtctttatagtagcacgatttataatcctttgggtatataccctaagacctgggacgcatttaaagcagtgtgtaaagagacatttatagcactaaatgcccacaagagacctctgcctgagaacgtgggtttcagcctaagagttgtaatatgtgtgcccattcacaggtgctgcatcagagtcccaggtgggaagaaggcaagcatacacaaaaatggtaaaaggcagaaaggagcccagtctcgttctttttaagaagttttcctaagaatctccacccagcgacttgctctcacatcttcttggccagcactggaccacacaactccttctagatacagaggagtcctaggattctatgagaaagaaggggagggtgggcaaagggcagccagctgtgcagcatctgctggagacacctaacccttggtggaggggttgtggtgctgggagaaggctttctggacggtgtgacagcagagataaacttaaaggccaagtaggagttaccctggtgaagcagggcagggttacaagcattccagcaacatgaagcagcaggagtgttttaattaaaagaaggcagttgctgtaaccaactataaacaaataaaggcttaaacacaatggaagtttatttctcactaagggaacatccaaatccatgatactttaagtcagggacccaggttcctcccatctatggttctgccatcactaatctgggtcttccacaattgccgtgctccttggaggtgggaagagcaggcggaggacacgtgggaggttttagggacaagcctggaggcagcatgcgtcactcccatgcagagtccattggccaatgctggctccgatggccacatctcactgcaggggcagctgggaaatacagtctggctgtctacccaggaggaagagcagccagtttctgctgctgatgatcaggaggtggagaaaatgttcagtcaggcagggagtgggaatagacaagaccacaagcagcttggtgcctctgaaagggagaggggtggaggggagactagagaggtgggtaggaatactggattccactgaccacgtgctggatgtcacgcttagccctcctgctctgtgccgggttaggcacctggtgttttacgtacataatctcaattctgtgagggcatccgacctgtgggaaaagagctgtttgtttcaaatgccagtcctgcttcctaacaagtgtttagagcttaatcgtgttcaaaatacatatacaatgtttaatacttacaagaatttggtggggaaaatattaccatctttcccttttgtgattggagaaaaatgaggctttgaagggtttaagaacttgcccaaggtcggccaggtgcagtggctcatgtctataatcccaacactttgggaggctgaggtgggaggatcgcttgaggccaggagttcaagaccagcctgagcaacatagtgagactttgtctctataaaaaataaataaataaataaaaacaacttgtccaaggtcagacaggcagcctcttagtaagcacacatatcctctatattatactacctctcatggaggatctcctgtgttctacaaatagtctggacttgagccagaatgtgttataatcctgggatcacggccagtgggcttagaagaagccatctctttctcatgccaagatgaggctcccccagatttgctcagacttacctatagtcagcagcatcgggggtcaggaaagacttcacgaagccataaatgcatccttctcggggcagcacctggctctcccaggtgagagaggactccattttcacaggcaggcgtgggagcttcagcacccatctctgggcccagaatgacccactggagaccttacagctctcctgtcacccccaattcctgccccctctgcagccttggaggagaatggagctgaagggcctgccctctgtagggtgagaaagggaggctaaagcctggtgcccactgccctggctgctccgcattgcaggagctgcgcccttcctttcctggcacagggtccacagccccgaaaccccgttgtgtgggagctgggcacagggcagcaggactaatccttggaacagctcagggaggattatcccagccactgtcagcagcggtgcagctggctcattcccatatagggggaggccagagccaggggcctgccacaagttggaaggctggggaaggggaggccagcagaggtgtcctggctgtgggtggctctgagggggctctcaggggtggggctaaatctcaggggcaggattatgtaaatcaaaccaattctagccacagatttaaagtttggaaaaaaaaaaaaacccagcctggcggaaagaatttaaattataaaaacttagaagtatggaatgtgaaatcatcctgtaggtgcttatttaacaacgaaatcatcccgacacaatgagccatatgtgaaaagtcatccttccccaacacatcccccaacaggcactcctcaagcctctcccacccaagtgctggcatcctccctgtcctgcttcacctgagacaccccttgtctcattagacatgcaactacgggaggggtgacaggaagacaagacactatttcctcaggcccagtttggtgtggggagaaagcctcctgatcctgaaagcaagaatttgaccagagcagaagtaatcagtatgcagattgattctgtggtatgttaatgtttatgcatagattatgaggaccaggtgaaaagtgggccaggggagccagatgtgtgtgtgagtcatgggtggctgagatgaggacaggagggaaactggtttggagggtgctggcgatggggtgggggtgccaggaggaagggaggctagttgtttgaatgtctgcatgaaaaagcggacgacagcggggtctgggtgaattcgggcaaccatttggaccgtggagaaaactgcctgcgtgcggctgaggacctgcactattaatttgttttttagctaaggcaaagataaatataaaaactgatactccacccagttaccagaaaacatttaggtatgtgtgagacaacttgggtatgtgaacctaccttttcaatgtaaattcagtgaaatctaagtgcagatcccatatttccaataaaaaggtaacatccaaactcagatgtcctatgagtataaaatacacaaagatcttctggacttagtatgaaaagggattttttttttgtcaggtacctcactagttatttttaaaataggattgcatgttgaaatgataatcttttggatatattgggttaaataaatttattattaaagttaatttcacttaaaaatgtttaatgtagctactagaaattttaaaattaagcatgttgctcaccttatgtttctattggacggctctctctagatacaaaggctgccaagagggacctcactctagcttcagggagaagagaggaattagcaaggccaagcagaggctcctgagggcagggccaagggcggcttggtggggtggggatgggatgcacagagataactccaacccttaagaaggtgtttcctagagcaggctgtgacctgtcagtttatatactgaggcttaggagcctcttggatgcccccagatctgcacccctgaattgccctgtgcccctgccgtctttgttcctgtgctggcatagtggtctcacctccggcagtatcaccaccactgggcacaagcttctccagcacagcaactgtgtcttatttctccttgtactcccagtgttcacaccatgctgcactcacagaagactcttcgttgatattttgtggacagagagaatgcctgtgagagtgggctgaagtgtgcgttgggctccagagaccttaaggaggggagaccaggtcctgagtaaagttgaaggggaggggctgagtcctgctagccaggagtctcatcccctggggaagttccagggacccctcagaagtgcaaggggacggtgttagtgttagtccagtaacacagcccagagcctgccttccacgtgggtttgacaggagcctcctaactgctcttctgcttccatttttgccccttcagtctattctcaacagggaagccagaggcatccttaaccatgtcagatcatgtggctcctcagctcaaagcctcatctcagaggaaagctctggtcccttagaaatggcccaggtggtgacagacagactctaaggtgagcagactgttgctagatatctgggctcggaggactcgccactgctcaaaggcagtgaggattttcgcactagaagctggaggacagggatccttgttaggtaggagcagaaagcttagaaaagtggtctcctgcagttacgtggcaaacacatcatgtaagtgataaattgggtatgcagttgaggagatttccaagtaaaatgttgaggatgctgcctggtttcttcttactgcttataatatagtgtgagagaagagagataaattgagaaagagactggtttttaaactgttaaaattgaatcaggacttgatgattttgaaaattgtcagtctccccacatggaaaaagatgctgaaattaacaaatggcttctgagcatgtggcatagggtgtaactgtacagtcttttgtgattatgcataaagatcaaaggatgggagtagcaatgagtcacacagaggtctgttgcaagagattacaagggtgtaccatgcagaacctctccaccaaaccttagggcccttgggaagcttcagtgagttaccctgggggccatcttggcaggagctgaaggtagaaaggtagagtttatctctaaaagattcatgggtatggctcttgacaaatcgactatgagccccactgaaacccacagaggacaggcaaagggtttgggaaagctgtttcacccacagtgctggcagattggtctgtaggggacagagtgcaaaatgaaagaagactgtcagagaccccaaactctgctgtcaagaagaaggctgataaaactacttggctgcaaacacgtggatctttcgtgagaaaagaaggatgacccagaggcagaagcccagaaggcagagccaagagacatggaatcttcccacatcttaaaacctgtttagggaacaccagcgtctgtccagctggatttcagaaccaccattccttcatccctcccctgctgcctctttctgaacagcaatgtctcaagctttacccaccattgtgtgttgcatatgtagggggcagatagcttgtatctttagttttccagatcagaggaacatccaaagaaatctgttctacacctaaacccgatttagatgagattcgggactgtgagcatgaagggatctcaagaggggtgaatgtgttttgcatgcacaagggacaggagtcttggggacagaggacaggctgtggtggcagatactaaggtgacccccacaacccccacctctgccattcacacccttgaataatccccttctctggttgtaagcagaacctgtggcttgcttatgaaggaggcggtatatatgtgattcatgtactgatcatattgtataagatcactggctggatgcagtggctcgtgcctgtaatcccaacactttgggaggctgaggcgggtggatcacctgaggtcaggagttcgagaccaggctggccaacatggcaaaaccccgcctctactaaaaatacaaaaattagccaggcatagtggtgcacgcctgtaatcacagctactcaagaggctgaagcaggagaattgcttgaactcaggaggtggaggtggcagtgagccaagatcgtgccactgcactccagcctcagtgacagagcgagactctgtctcaaaaaataaataaataaaatgttaagatcataacctgtctttctggggactctctcttgacgcctttgaagaagcaggctgccatgttgcaagctgcctcatggaggggatcagctgcgaggagctaagagccccctccagtcgatgctcaccaggaagctgaggtcttgtgtccagcaccctgcatggaactgaatgctgccatgtgagcttggaagcagagccatccacacagctgagccctagatgagaacccagtgctggctgacaccctgatggcaccttacagaggaccagttaggctgtgccaactcctgacctgcagaagctggggaacattgggtcgtatttgcagctgctggatttgtgggaatttgtcacacagcaattgggagtcacacagcctgtgacgccccaacaatccacacctcctgcatctccctgccttcacttcctagcacactgccctgactccctctgccgcagccacgctggccctctgctgttcttcgaagccaccagggctgcattggctcccagcctttgctctcactgctttctcctcctagagagcccttcctgcatgtatatgtttgactcactcccttgcctccttcagacttgtacttaaaaatctcagtaagcatttccctggctacccttttaaaaattgcaacccacttccatccccatccccaacatgccatatttcctttcttcttcttccttcttcctttttttttttttttttttttgacacaggttctctgtcacccagcctggagtgcagtgacatgatctcggctcactgcaacctctgcctccccaggcaagaaaaggggaggatgccaataaaggatgcattgatttgtatttactacagtggacatcaagggcacattcttgctgtggccatcaagagactgtataaattctatgacttgtagttgtcccacttaagaaacaaagaagctgtgcatttctttactggtctagagctgctctagggcattttctctacagcaattctaggtttccccaccttgtgagtttagctttttctatattcaaagaaaagtcctcagccagagattctcaggagcttatagaacaatccaaactcttgggaatattaagtggagaggggtacgtgcaagacaccaacagcactagaaacagtccacatctttccatgcgtggaggagtttatgctctatgtgagttcactccatcattaattcttcaaacacaagagtgttaaaggaacaagagttaatgggtcctgtcattacacttgttcccaggatgacattcttcatcttcctcttctacaacctgttctatattcccctcatgtttatccagtgcttctgctagtctagttcacttccaaagacccatgattaccatggccctgtcaggctgtaattgctgcaatttccaatttacaattgtcatcatctatggttgataaaggtatagcaatatttctatttcctcatgataatgaaggtcaattacaactgccagtataataacttatttctttgtctgccaacctacatacacaaggaagccaaaatgacagggagctactaaaactttattcttattggaatgcttactatgtacccagaagaagcattctccctactccagcagagcttaatgctgtaggtccaggaagctcaaattctccaagggagttttagtgagaggagccactctcaccctctgcccttggtttacaaacctgtatattctaggacccaatatcttacaatgtccattggttcaaagtataacatgttaaagcacagagccccaactctgaaaagtaccatccctaaattggcatttagttgcacctttatatccacctttaaaagaaatatcttttaatgttctatcagactgatagattctgtttaatatagtatattatagcaccagtggatcatttggttgtatgcatattattgtaccttctctgctacaaaatatattcctttgtcctaaggtgtgttacaaagaacattaggcattctatgcatctttggatagtttaatggccaaggcattgatggcaggagagtcaaagccacaggtggaaaacacatttatcccagtaagaacaaattgctattcttccactgtagagagggtaaacaatgtgccattacgttgccaattgaatgcctcaatcatgtcaagggctgaacatctatgactgtttctgaaaggtcaaacattcaacagaggctgtagctagaactgccttaatgataagagatcatgctgaattacccatgcaaaaccttaatacttgacacttatcactactttattcaagagcctattgtgcaagcataagtggctgagtcaggttctcaactctgctcattaatactatgcttggagtatacagtaagataagaaacataaataagaagtgtacatttgtttcttcctgttttcttctggctattggatcaattacatcccatcttaagctgacccctgtgtaattaatcaatatccgttttaagcagcaatccatagttgtgcagaaattagaaaactgacccacacagaaaaactaattgtgagaaccaatattatactaaattcatttgacaattctcagcaaagtgctgggttgatctctatttacgcttttcttaaacacacaaaatacaaaagttaacccatatggaatgcaatggaggaaatcaatgacatatcagatctagaaactaatcaattagcaatcaggaaggagttgtggtaggaagtctgtgctgttgaatgtacactaatcaatgattccttaaattattcacaataaaaaaaaagattagaatagtttttttaaaaaaaaagcccagaaactaatctaagttttgtctggtaataaaggtatattttcaaaagagaggtaaatagatccacatactgtggagggaataaaatactttttgaaaaacaaacaacaagttggatttttagacacatagaaattgaatatgtacatttataaatatttttggattgaactatttcaaaattataccataaaataacttgtaaaaatgtaggcaaaatgtatataattatggcatgaggtatgcaactttaggcaaggaagcaaaagcagaaaccatgaaaaaagtctaaattttaccatattgaatttaaattttcaaaaacaaaaataaagacaaagtgggaaaaatatgtatgcttcatgtgtgacaagccactgatacctattaaatatgaagaatattataaatcatatcaataaccacaacattcaagctgtcagtttgaatagacaatgtaaatgacaaaactacatactcaacaagataacagcaaaccagcttcgacagcacgttaaaggggtcatacaacataatcgagtagaatttatctctgagatgcaagaatggttcaaaatatggaaaccaataaatgtgatatgccacactaacagaataaaaaataaaaatcatattatcatctcaatagatgcagaaaaagcattaacaaaagtaaacattctttcataataagacatcagataaaacaaattaggaatagaaggaatgtaccgcaacacaataaaggccatatataacaagcccacagctaacatcataatagtaaaatcatcacactggtaaaaaaaatgaaagcttttcctctaaggtcagaaataatataaaggttcccactcttgctatttctattccatatcgtactaaaagtcctagccaggacaattagacaaaataaaaataaaaacacccaaattggaaagatagaagcaaacttttctgtttacagataacataatcttatatgtagaaaccccttaaaacttcagcaaaaaaaaaaaaaaaactacagagctagtaaattcagtgaagttgcagaatacaaaatcaacatacaaaaatcagtagtgtctctatacactaataaggacttaacagagaaagaagttaagaaaacaataccactaacaatagaatccaaaaaataaaatacttaggaataaattttaccaaacatctgtacactaaaaactataaaacattgaaaaaagaagttgaataagacacatataaatagaaagctatctcatgttaatagattagaaaaagtaatattgttaagatgtcctcactacttaaagcaatttatagatctaatgcatttattgcaatctcttcaaaatcccaaaggtatttttgacagaaataaaaaaaaaattctaaaatatgcatgaaaccacaaaagactgtgaatagctaaagcaatcttgagcaagatgaacaacactggaagcatcacactaccttatttcaaaatctactacaaagctatagtgatcaaagcaacatgatactgtcataaaaacacacagataaacctatggaatggaataaagagcacagaaataagtccacacatttacattcaattgattttcaacaacaatgtcaagaagacaatggggaaaagacaatctcttcaataaatgatgctggaaaaactatatatccacatgcagaagaatgcagttgaatcctgatttcataccatatgcaaaattcaactggaaatggattaaatacaaatttaaaacatgaaatggtataactattagaacaaaacatagaaaatattcttcctgacattggtttgggccatcatttttctgatatgactctaaaagcacaggcaaaaaaagaaaaaatagacaaatgagactatgccaaattaaaaaatttctaacaacaaaagaaacgatcaatagagtgaaaaagataacctcttgaatgggagaaatatttgcaaactactcatccaaccggggattgatatccagaatatacaagtaacacaaatatgtcaaaagtaaaataaataaataaataaataaataaataaattaaataaattatttaaaaatcggcagaggacaggaatagacatttctcaggagacaacatacaaagggccacagatacatcaaaaaatgctcaacatcactatttgtcagggaagtactaattaaaaccaaaatgagatgtcccctcaaacctgttagaatggctattatcaaaaagatgaaagatagcaactatcagagaggatgatagaaaagggaacccttgcatcatgtacaaattaaaaatagaactatcacatgatccaagaatcctacttctgggtatatagccaaaggaattgaaatcaatatgtcaaagggatatctgcactcctatgttattgcagcatgttcacaatggccaagatatagaatcaacctaactgttcatagacagatgaatggataaatgaaatgtgatatggaaaattattcagccttaaaaacagtaggaaattctgtcatttgagacaacgtggatgaacctagaggacattaagctaagtgaaataagctagacacagaaagacaaatattgcatgatctcacttagaatctaaaaaatctgaactcatagaagcagagaatagtatgatggttactagggttatctggcagggagaggatgaggaaatgggacattgttaataaaaggaaaaaaattcaattagtaggattacattcaggggacccaatatacgacatgttgactgtaattaataatgtattgtatgcttgaaaattgctaatacagtatattgtaaatgttaatatgaggtaatatatgtgttaattaacttgatttattcattcaacaacatacacatatattaaaacatcacactgtattccacaaatatatataatttttgtcaattaaaaaataatttttaaaaatgagaaacaaaaaagctgacattttcagattaaaaaaattatacagaagaattaattcattaaagtaaaaacaaatgtgggaaaatggtttttaaatataatttaaaccaaatttaaaataagcatataaagactatggacaaaacaagaaatccaaataaaaaataaacatatgaagaatattcaaactcactttttatcaaagaaatgtaaattttaaaatatagcattgctattgtgttttcataaataataatatatcatggatgagcctgtgaggaaacagacactcatactctgcaaagcaatgactaagataattatgtcagatcatgaattacgttaattagcttgatggtggtcactgtttcacgataaatatacatatgtatcaaaacatcacattacacaccataaagatatataacttgttatcaaaaagaaatatagcagttaaaatttaaaatttttaaaaaacgtctttttgaggttcgtacctcacttaagtcacactgttcaaaatattcatgcactcatttctctcattcatgtgttaatgtacagggtacgggccactataaattccttcagcaactggaaaggaaactttatgtactgagtgctcagagttgtattaacttttttttttttttgagcagcagcaagatttattgtgaagagtgaaagaacaaagcttccacagtgtggaaggggacccgagcggtttgcccagttgtattaacttctaattcaacactttaagattcttagcattattgcagacaacatcagcttcacaagtgtgtgtcctgtgcagttgaacaagatcccacacttaaaaggatcctacactttttttaatgctctgctgtttctgccttgaaattcttaacaatttttttaaccgaagtcctcacaaattcagtttacattagccctgcaatcatgtagacatcctgattccagacaatgtgtctggaggcagggtttacaggacttcaagaaccttaccttctcaactttcatctgcatctttactcccaactatatatgaagatgatgaagatagatatggatggtgcttctaccataccctcttcctctgccaaacttccttgatctaggataaggtcagtaaacttcttccgtaaaaggccaaaagtaaatattataggctctacaggccctagagtgtctgtcataactactcaactcttattgtagcataaaaactgtcaacagacaatacagaaacaaatgagtgtgactgggttccagtgaaactttatttacaaaagatttgtcccatgagtcaaatttaccacctccagatctagagaaacacttttgagcccttttattttgctcaacagttaagcatggctccatgtcccttatatttagtcagaactcggtatgttttaaggaaagaatggttacacgaagacatacattcattcatttatacaacacattttcagtgttgaatgataaattttggaatagttaacagatgataaaagtgttggtttcagtcatccctatccaatgaagtaaaaaaaaaagtgttgaatgggaagaaatcaagaatagttatacgaatatcaccattgcattaaagctctcttccttgtttctaaaagaatatcttgacacacattaagctcactgacccccacaccatgaatgagggcatcttcaacaatggtggatgacgtcttagtttccctcaactcagttaatctaagtaagctcatggtatcactttcctgtcctagagggaacatatttcctgcatttttctttttttccttactttccatcaccaagtaactcttctgatattttttctcttgagaaaattaatatgactcatagatctggttcccaagagaaaccaatggaggcctggttacaaggatctaagaagcaccagtgggtctctaacatctagtggtactaattaactctgttaatcattgggaagaaaatgtatacatacttttgtcttggagctgattctactagaaagcagaaatcaaaatgatcagtttcccagtgtcactactgcacaccctggaacagaacaggtaggtcagaaaaacgctcccaaagtttagcaatgtcaaggcaatctctctcttcttacatttcccttcaaccttccatctcctccacttttctgttttcctcctatctccaattatttcaatcctcagagcattattcttacaatcttaatcactaaattatattacacccgttaaaggagagatttctaaatgcattgacatttgtactgtctctctttggagaattagtattataaggatctgttatctcttgtcaccttccttatgtcatatgatatgtcacatttcccactgcggagaccaaacatgttcacgtcgtgtgcgttccattttcctaatggaaagtggggggaagtgattttctgtcctcatatagagaatgctggggccattccctctgtatgccatatttgataaagcatttgataatcttagtcaatgcctgggccaagaattaaaggggtaattatcagaatgaaaatggtttaatgaaactgtgtctatcagttctgaaaagggcctctatcacaatgaactaaggtagttatgaatagagctaaaacttaggcaacaccatcctggacataggaacgggcaaagatttcatgacaaagacacggaaaccaatcacaacaaaagcaaaaattgagaagtggaatctaataaaacaatagcttctgcacagcaaaagaagctaccaacaaagtaaacagacaacctacagaatgggagaaaatatttgccaactgtaagtctgacaaaaatctaatatctggcagctataaggaacttaaatttacaagacaaaaacaaccccattaaaaagtgggcaaagaacatgaatagacactctcaaaagaagatatacatatggttaacaagcatatgaaaaaaaagctcaatatactgagcattagagaaatgcaaatcaaaaccatattgagatatcatctcataccaggcagaatggctattattaaaaagtcaaaaataacagatatcggtgaggttacagagaaaagggaacacttatacactgttggtgggactgtaaattatttcaaccattgtggaaagcagtatgggatggcgattcctcaaaaagccaaaaacagaactatcattcaacccagcaattccattactgggtatatacccagaagaatataaatcgttctaccataaagacgcatgcatgagaatgttcattgcagcactactcacaatagcagagacatggaatcaacttaaatgcccatcagtaacagactggataaagaaagtgtggtacagatacaccgtggattactatgcagccataaaaaagaacaagatcatgtctttgacaggaacatggatggagctggaggctactatccttagcaaactaaggcaggaacagaaatccaaataccacatgttctcacttatgagtgtgagataaatgatgagaacttacaaacacaaagaaggaaacaacaggcattggggtctacttgaggacgatgggaagagggagaggagcagaaaagataactactgactactgggcgctacctgggggatgaaataatctgtacaacgaacccccaggacatgagtttacctatgtaacaaaccttcacatgtacccccgaaactaaaataaaagtcaaaaaaaaaaaagaaaaaaagaaaaatccatgcatatgatacatcagttaacaaggcactggtgaaattaattttaagtattattgtctctttgtgtttttggtctcagaaaagttacgatttcccttagttccttagggcagagagaatcttcaatcactgaagtcaggagacacacattctatctgattttctacattatctgtttgaaaaggttacccacttattagtgttaaagccaagatatccagcaaggatagcaaccaactcttaaggtactctcccttaggaggattcctgattctttaatgttttctaaaaaagcaaaacaaacaaacaaacaaaacaaaacactaaatgttttctctttcaacttatttgaatacactcttttctcactgctctgagcatgaattcaatatttcagggcaaactaactgaatgttagaaccaactcctgataagtcttgaacaaaagataggatcctctataaacaggttaatcgccacgacatagtagtatttagagttactagtaagcctgatgccactacacaattctagcttttctctttaggatgattgtttcattcagtcttatctcttttagaaaacataggaaaaaattatttaataataaaatttaattggcaaaatgaaggtatggcttataagagtgttttcctattgttttcagtgtaggactcactgttctaaataactgggacacccaaggattctgtaaaatgccatccagttatcatttatattccctaactcaaaattcattcacatgtattcatttttttctaaacaaattagcatgtagaattctggttaaaatttggcatagaacacccgggtattttttcataatgcacccaataactgtcattcactaattgagaatggtgatttaacaaaggataataaagttatgaaaccaatgccacaaaacatctgtctctaactggtgtgtgtgtgtgtgtgtgtgtgtgtaagagggagagagagaaaatttcactccctccataaatctcacagtattcttttctttttcctttcctttccttgctcttctttctctcctattgctttcctttcatttccttctcataaaagaaaaataacaatatagaaaataacaaaatatagatggtcaacctttttaatattaaggttacctaaaatgccattatccaaagtggttctctagagatgctgatgtatatacttacatattttacagtgtattcaaataaagagtatattacataagacatatccttttgtaaccaacttttgtcattaacaatttactggacttgtcaacaaacctaaatctgtatcgtctataatggctacgttcattttggtatgaatcttaattacccctttctgcattatttaatgattttctcatatgtcactcttaaatgtacttctaatttttcactttacatcacataatgaatggatccaaatatgttatggatagatatcttcaaactttctacttacaagtagtgataataacagatgttctctctaaagtgtagttggtatcaattttactgacctttaaaaatatcttaatgggacaaagttcaaatatttgatgaccagctatcgtgacctttatctctgtggctctgtgggcctgtagtttttacgtgcttttagtgtatcatgattaaatattttgttttagtaaagacaccattatttcccaacttcatattcaaattgtcaaaggtattaatcctagagcagaactctcaaaagcaccaactctgattcctaacaaagcatggaaaagccctctctctgagtttcagatactcttttttgtgggggttgagtttcactttatttaaagtgagtcttaatcctccaacaagtcaacaagtgattggctggaatcacacgtattggaaaaccagcagaagagtaagtctttgcattttatgctactgtacctctgggattaattgctctttccctcattggccagtcactcttagtgtgtgattaatgcctgagactgtgtgaagtaagagatggatcagaggccggg[131 bp omitted]gggcgcggtggcgggcgcctgcggtcccagctgctggggaggccgaggcgggagcatggcgggaaccgggaggcggagcttgcggtgagccgagatggcgccaccgcactccagcctgggcgacccagcgagactccgcctcaaaaaaaaaaaaagaagattgatcagagagtacatcccctaagggtacatgcagataaatacaattaaggcgattaacatttcaaacacggtgactgtttcttacgtggacgacgttgtgttgaacatgggtgagtaagactgaagcagccgtaattactgcacgatgcgcatggtaaagaagcactccgttacggaaattatattctttgcccctctaatccttcactccacctgccattttcccacatgatttttttctttgctgttcttgtctaattgttattaataattaataaataacttatgatctaattgttattaataattaataacttatcatcacatgatttattaataaattaataaataacttatgatcaccgcatttccccaattcatttatctttctttcattttctctctttgtgtgttttctgtcttcatatttcagcacttgccacatatttcccacaaaatcatttatggtcaaacaacacttcaacgtgtagcatttgtatttctcaattcttcctcactttcttccttcagaatactaaagcttcttctctactgactgagtcaatggccaatggatagagtaaataattctgcggtatctaaatttgtattgattggactttcaagctcttgggagatgcatctttttcttttttggttcttctctgtgttctacatgggaattatcctggaaaatctcttcattgtgttcacagtaattattgactctcatttaaattccccaggtactgcctactggccaacatttatcttcttgatctgggtcttctcctacagttctgactttttcactaactgcagcatcatttcttttccaagatgcatgatacagatatttttcatttgtgtcatgcgtaaaaattgagatggtgctgctcataaccatggcatagagcaggtacactgccaatctgtaagcctccccattacctgaccacaatgaaccccaaaatgtgtgtttcctttgttggaggcatcctggatagtcaggataatccatgctgtatctcagtttgtttttgccataaacttgcctttttgtggccctaatagagtaggtagttttcactgtgattttccttatgtcatgaaacttgcttgtgtagatacttacaaactagaggttgtagtcactgctaacagtgggcttatatccatagctacctgtttcttattaataatatcctatattttcatttcggtaaccgtctagaatccttcttcaggagacttatctaaagcatttgtgtcatgttagatcacatcacagtagggattttgttttttatgccatgtatatttctctatgtgtagcctttgcctaaaacaacacatgattaatatttgttcattgttccttttgctatcacccctgtctaggatctacacattaagaaacaaagacatgaacgtctccatggaaagactgggaaaatggattgcaggttctagcaggatgtcataataaatggtgcatatccagagtgcaagatgattcagtctcaccaagaacactgaaagtcacatggctaccagcattattgtgataagaactactattttgggagatagtttagcaaaggtgccatgtagaaattgattaagtcagaggtatctttaacttgccaccacagagaagagattaatttcatatacttccattgagaagagagataagaatacaaaaccaagctgatttgcaggagtaaacttgatattcaaatactatttcctgaatgacattttctgagacatgctaattgtaattactttcagcttcaaaacataataaatttatctcatagtaagcatatagatggaataaataaaatgtgaacttaggtaaattataaattaataaagtatatttttaaaatttccattttactttctgtttaaattagaataagaaacagaaacaactatgtaatacgtgtgcaaagccctgaactgagatttgactttaccttgagctttgtcagtttacgatgctatttcagttttgtgctcagatttgagtgattgcaggaagagaataaatttctttaatgctgtcgagactttaaatagatacagacagagcattttcactttttcctacatctctattattctaaaaatgagaacattccaaaagtcaatcatccaagtttattctaaatagatgtgtagaaataacagttgtttcacaggagactaatcgcccaaggatatgtgtttagaggtactggtttcttaaataaggttttctagtcaggcaaaagattccctggagcctatgcatctgtggttgatattttgggataagaataaagctagaaatggtgaggcatattcaatttcattgaagatttctgcattcaaaataaaaactctattgaagttacacatacttttttcatgtatttgtttctactgctttgtaaattataacagctcaattaagagaaaccgtacctatgctattttgtcctgtgactctccaagaacctttctaagttattctacttaattgctttatcactcatatgaatgggaatttcttctcttaattgctgctaatctcccccatcttcatatactctaccgggcttctggaacaccacagcttcctggctttttctcctacctcctgggcaagtccttccctgtgtcttttgttgagtgttcctcatctgcttaaccaccaatcaacctattgcccctaatttgatctttggcctgttttcacttagattctatccctacgtatcacccattcccacagctttaattaccatctaaacactaggggctctcaaaccttctattttttctttctttctttctttcttccttcctccttttctttccttttctttctttcattctttctttcttttttaaggggcagggtctcactatgttgctgaggctggtctcaaactcctgacctcaagcaatctgtctgcttcagcctcccaagtagctgagaatacagggacaagccattgcacctgaccctggtactatttcttgagttcctgatccacagatctaacctcctactttcctggatgccacacaagatcttccactcaacaagtctgcaactaaactagccttcctcttttcaaacctactcttctttcagtgttctcagtcacaataatttgtaccaactagttacctagttgcacaacccaaaatctggggaaaataatagatttctttctccatagtaccccaaaatcaataaatcatcaagtcttattctaccttccaaagagccttacatatgttcctttattttcatctgtaacaccactattcctgtctaagcctacctatgtcatttttggaagagaatatagtcacctatgcgatcttcccacttaaaatcctattatctacgcttcagtaaaagaaaaaaaatttttaatctaagtatgtaattcttttgctaaagacaattcacatgcttctgtgcccttaaactggtatgttatcatggtatagtaggccatccaagacctggcttccttcctttttttcagtctcagagaataacatactctttccctgcaactccagatccaatttggttttcttttacttgcctggaaacttcaaattctatcaactctggggctttccactagctaatcattttgtatacaatatttgtccttcatgttttgcctcttaacatctcagctttcagtttcatcattttaccagggaggcctcccagaacctgagtccagaagagttccttccattgtatattcctctagcactacctattacctcttttgtaagactaacagccctcaaaatttttcattcagtgatgtcttcctcattgcattttaagttcaacatgagcaggactttgtcatgttcacctctatcacatcataaatatagcaaagagtaaaactattgcaacatgactaatgtattgaacgatgcttcagctttcttcttacgttcaatcacaggtcatacgactaaagaacttcctttttaatctccttttctattctcaattaatttcctctgcctgcatcacctcaagtctctggggtgaaatccactaatgaattccttttgcagcttaagccaattccaatcttgagccaatctcaggtgaagaagcctgtaaattatcactctcagtcctctcttgtactactaggtctcatgaactcttcattaacaactccagcttctctgttagcccaaaagccttttgctgcctagaaaacccatgattcatgcctcaggaaacagccttcaaatcacaacatgttctgtatctggctggccaactccctgcaacttatttctgcctagatgctccctcattcatttcaatacgctgttcggcctgctaccccagtttcccacttagaacaatggcacacaggacaggagcacattggcacatcagaatgacttatgtactgctcattgtgttgcagaagagacctctgtgggggcaatagaacagattttcctctcacgtcactgtagttgtggtttccctaagcacctacactgttttacctcatcttaggtagacaataatccatgtaactgactgtgtatcctaattttaaaaaatatttctgcccacattattctgcagtttttatcttgcttacgtatttttggaatgttactatttttcaaaaattaatttgggatcaaccaacatttcttattctgctgctgttctagagaaaatcattttcctcatttctgaacaagagaaaatgaaatacagctctaaacaaatgccactgtaaaccaaggtggagcctttgcactttcaggccaccatgataacctggagattagatttttctgtgtctttacatcaataataaagccaagcttctccaggggtatccactaggcttgtctcaatggctcaatacaggtccttttgtgaatgattacctcaccctcatggaaacacactcttgttacagaaactcagaatgattctattttttcttttatatttgtatatgtttttccaatacctctgaaaaaactgatccaaaaaaaaatacaaattttaattgtagccagtcaattcaggaaggacaaaggtcaaaaactttcaaagaaaccttcaaccccaacacactaaactttgggagcacaggttggcatccagaggtaaacatttgctataactgataacaggagaaggatccatttattcacctgttatcaattacaggcattgtatttaaagatcagatgttttatatttatttcttcaaatttcattcatggtgccataagtgaaggtatgtctgtccaccctgaatatattttcactccctcatctcagtcattccgaacaattcacacactaagattacccatgctaaatggggattcttttttactagccaatgtagtacctcaaatccttccttccttccccctatttcatcagcaggcaattcttttgatacttttgtcaaggggaaattgtgtgactcagagatctagtccccaagagaaactaataatgggctgggtattgtctgtctcagcagcatcagtgggtccctctcctgtgcagctaattagcttcctttccaatatgaagaatcttatatatagctttgtctttggggtattacataaatgaagattaagctatctgaatttctccttctcctaaaaatgcacatcctatgactgaaaagacaggtaaaagagatgcttttaattacaaaaccttccctgtcgtggttgcttctctctatccttctaaactccctttcaatttcttctcttctgtaacatatttgtgcccaaaatcttctgctttctgaaatattttatctttttcttccacactatctcttattttcaaattttaatcattaaattatattatgtcttataaaactaatcccacatataaacccctatgataatttcagtttgtccctagtatgaagttctttaaagatgtgtagttttctaactttcatgctctccaattcattataaacttcattttccactctgaaaaggagatgtgtgatctcgtctatttccatcctatttgaaaaccagatttagttttaaaccagaggaagggaatctcaagtctttacctcccacagtctggtgtgattctctctcttttggtattaccttcctccacattggaacactccagccaatgcataggctgagaggctatctcagattcagaaagatttggcctcatcccaggggagggtacagaggagctgatggctatgaattctgaaatggaactgttccaggttgaagaaataagaaagggaattgggaagagcaatgcccagtgaaaaagaagaaataatattttaggaagtgaatgctaattttattttaaacaaaataagaactcaaggaataagagggttcttccaataggttagagtgatcctgtcaaacatatatgcttctagatttttttaaagactgtttctaccaagaaagcatagaccactattgagaaagatcattaaactggaatttaggaggtctgccttctgattctgacttcttgaatgtattgttagccatttaaccacactgtgttgtttctcattctacctgtagaatctcaaagttctttcccacttctatacaaaactataattctgaacatcctttttgtttaatataagtctgcatttcctgtttgaagatatgtgtcccagaccctaaatgactgacaaattttaaatctccaataggaaagatgacaaactctatggaaacttggcttctgaagaactcctagaagctttccaaagtcatcagtgtttcctaagaaggcagagaaatcaaacacatggtcttttcctctagacaagctcctttgggtcatcaggatttcttcaacaataaaatgtaataattccaaatgtttgtaacagaatgggtaggactttcttcacttatttaaatactcccttttttatgcaactgagttttcatcaacaagtacaagcttgtgaaggagtactttaaaatgcaatttctctctatttttgtgggggctaatattttatttctcatattgacaatttattatgctgtttttagaaagttcattcatcaagtatttcttgagctttttctatgagacaggcactgttttaggcaagtaattatgcactgaacaatgcaaaaagtttccctgcactcatggactttaattttacatttatgaaaagctacaaatattagaataagtaaaatactgcctggaggctaaagcatattttgatcacttattccctaattcttttagaagagaactcacctgttggttagctgaaccactgccagtgatatccaactatacattcaatcccaccatacctcattatcacacttattcactcacaagcttaaactcttaacttttctccacatatcagtgactatttcctacagcttttcttttactttccatgtttgcagtgacaatatacataaacagtgtatgaaaactcaagtaaaatctactctctcaggtgttcataatgcatcaatgtatattgctttaagcctgaaggtaacctaagtaaagatgtaccatgttccaccaatgcttcttttgatcatcattttatcctgttttttctttaggattctttcttattccttcccctgacccttcttttattctccaaatttctttccaattcatctttgttcttccctttcctttttactctctttaaacattctatggactctgcctccttcacactgatattgaacgcccatagtttcatattttggattgcgattgttttattttaaaatggcaaatgttcatgttataaagagaatttttcagtctttagactaataggttcatgtagtttgggattttcctctttaagaaaattaattatcactcacactccaagacaaacaccatttcagtagcaatatgaatttcagtagtaataggaatctccaaatatgacaaagtaattcagacattaattgcttttgttttggaattgctcttataagatgaaatatcactttcatgatgagagtcctagagtgcttggtttatatattgtatcttagttttaacaggataaaacacttgatcctaagcagtaaacatgattcttcagcttcaacttcatttctttataaataactatttatgaattggtgttgagcttagcaagtcaccaaacaccttctgctcagcagcataaaggacatttccatgaaacctcccagggataatcttatttactctataatgtttcccgggttcaattcctctcccaaaatcctttgttcttaagcccctatgatctgggtgatctaaatatgggtaagaagtccagggatagcactatgaatgaagtgaaaatagtaaaacatagttaaaaatgtacagatgctctctgacttataatagggttatgtcctgataaatccatcataagtcaaaaatgcatttaatattcctaatgtacctcacatcatagtttggcctagcctaccttaaatgtgctcagaacactttcattagcttatataagatcacctaatacaaagcctattttataataaaatattgaatagctcacgtaatatactgactactatactcaagtacagtttcttctgaatgcatgtcactttctcaccattgtaaagtcaaacaattataagtcaaactatcacaagccagggaccatccatatgtatttcattcagaaaatgctggaaaaagcatttaggagaatatctagatgagagaaggtagaaagccatgcacaaattcactgagagtttaaaaaaatgcatgcatattgtggagatagaaatcaaatctatttgtttccatctgctgtattcttcccaaaatattatctcttcttatcccattgtactatattgcatttctttgaccatttattgtgtatctcttaatatttcccacttcatcattactaacctcactcactctgaacttgatgagagcacctgagcattaatttttcttataattatttaatgattaccagaattcgttcagtatggccagctctggtcaaagtgaggcaggcaagatgctttgtcaactgcctggatggaatgtctcaaaaggtttccatttcatggtagcattatgcaaagttcaagacgtttaatcaagacccttcacttacttaactatacctccttgagaatcccatctatgaaaaaattctagtcattataaaaatgattgattaaatgagggaagtagtagagttcttcatttctttagttggtttagtctcctatgagtcaatcctagttttcaaaattcttaataaaccatttattccttcaactttctatgccatttgatgttttgtaaaaaaaaatataatatgtatacaaaaagatatttcaaaatctagaaagagagctttagagctttgtaaagctcttttaaaaatcaaaagcaactactgttaattaacatgttgtactatgcaatttctttaccattattactcttagtatttttaagaaaagtctttccattgttattataaatgcttctattgatatttattttaataactgttattacagtccgtcatgtacatacactatacttaaacctaatgtttggtatttaaatcgtttcaagattttatcactgtcaacaaagtatgatgaatatttttatgctgaaaacttctgtaaaaatagaattccaagagtattattgcaccaaaaggcatggacttaacattcttgatacatgatttcaaaatattttctttaaggtttgaatcagtctatattccctccagcagcgtataaaagtgccaatttctctgatccttagccagtttgggtaataaaaattgtaaaacttttttttctttttttttgagacagagtctccctctgtcgccaggctgaagtgcagtggcgcaatctcggctcactgcaacctccgcctcccggggtcaagctattctcctgcctcagcctcccaagtagctgggactacaggcacccgccaccaccatgcccagctaatttttgttatttttagtagagatggagtttccccatgttggacaggatggtctcgatctcttgacctcgtgatccaccctcctcggcctcccaaagtgctgggataacaggtgtgaacaaccatgcccggcctgtaaaactttttcctaatgtaacagaaacataatagtattacattttatcatatttctttgatttctaagacacacatacacacacacacacacacacatatctgtatatacaaatacacgtatagcttacattttaattcttccttcatttcatttgttcatttattaggtcttggagattttgtgaaactgtttaaattcttttttatactatgaagatatcaaccttttgtctctacagcatttcaaattcaagtatgattcacgtgttagtttggggtagatcattataggcacatgtaggaaacagctttcagagatgccttaaccgtaattatgcatttgtattctaatttttatttaatgttattattgattgcatttttaaagattctgtattttttaaaccatttatttgtatatattggtatacaatcttgccattttctgggatttcatatttccttatttttgttttttaccttttttggcttgaattttttgagtttttatgcattcttttccagtttcttaagatgctaataagttcatctatttgagcaattgagaacatttaaagcaatagactgcctctgagcacagctttgtccatattacattaaccttttataccctgggttcccactagtttttaaataatctactatcaaataaaagatttgttaataataaattttaaatcattaacacttaacgcattattttcagtcacactaagttgattccttcgtttctttcaggttgcttcacagtcttcccttctatctgattcagtggaccaagtaaatgactctctggtaacagaatttgtattacttggacttgcacaatccttggaaatgcagtttttcctttttctcttcttctctttattctatgtgggaattatcctgggaaacctcttcattgtgttcacagtgatctttgatcctcacttacactcccccatgtatattctgctggccaacctatcgctcattgacttgagcctttcatctaccacagttcctaggttgatctacgatctttttactgattgtaaagttatttccttccataattgtatgatacaaaagttctttatccatgttacgggaggagttgaaatggtgctgctgatagtcatggaatatgataggtacactgcgatctgcaagcctctccactatccaactattatgaatcccaaaatgtgcatgtttttggtagcagcagcttgggtcattggggtgattcatgctatgtctcagtttgtttttgtcataaattaaccttctgtggccctaataatgtggggagcttttattgtgattttcctcgggttattaaacttgcatgcatggacacttacgggctagaatttgtggtcactgccaacagtggattcatatcgatgggcaccttctttttcttaattgtatcatacatttttattctggtcactgtccaacgacattcctcaaatgatttatccaaagcattcttcacttcgtaggctcacatcaccgtagtggttttgttttttgctccatgcatgtttctctacgtgtggcctttccctactaagtcattggataaattttttgccatcatgaactttgttgtcacccctgtcttaaatcctgccatctatactttaaggaacaaagatatgaagtttgcaatgagaaggctgaatcaacatattttaaattctatggagacgacataacacatttggttgatgagagcacaggataaatgccatggaccatcaagactcctgtgatcaccatgatcactatggaacgcgcacatttttagtattgcctgaaaaaactgaaaaatctgcaaaaaggatgcattaaatctaagaattgtatttcagataaagttgcaacattttttgttaatcataaaaagtatatatttctatctaatgtgtgtatctaattaacagcaatgactatctttaattttgatgtagttattttatatctgtatataagcacatacacatatatatgacctaggtttatttatcagtatttttatgctgataataagcatcactggaaattaattttcttatggaaattatgtggatccaatggataaaatatgagtttatataaattagtaaatgccaaaatcaaggaagaaacaatttttattttaattgtactttaagttagataaatggtaaggtcaacagcttgttacaacccttaagtattattttcaggctgattgtcaatatgttttgtacaatgttctcacttataggtgggaattgaacaatgagaacacatggacacaggaaggggaacatcacacaccggggcctgttgtggggtggggggaagggggagggatagcattaggagatataactagtgttaaatgacgagttaatgggtgcagcacacccacatggcacatgtatacatatgtaactaacctgcacattgtgcacatgtaccctagaacttaaagtataataaaaaaaatagactctagtactctgtattatgcaaaatttgtctatgttacacttttttaacaacacaatcctattgcccttgaaatcttcttcaaagcatttctcgagtcactcttaaaaagcatctacaacctaaaagtataggaagagatttatttcctggagaagagaccccattgagatcttaaaagcacatataatgtgcctgtgcttaacttaaggtgcttaggacaaagaaggcgattgacatctttcaggtaaaacctggtaagtttggtggtcaaggaacacaactgagacatcacttggatgtatttctatgactattttaagaaacataaattgtggtgactcactcagctcacttttaactactgcatggtaattaaagatgcaaaataaaataagttacaagaagtgaggttttttattggttaaagcaatttttctatattttctccgcaagttggtcataaaagttctaagcattcctctttttataaaatcgaagcattattacttactctcttgttaacctatctggattttaattttgtaactttattatatttgttttgctgtgattctttaaaaagcacctttagactcagtgagatagcaaaaatatccaaataggccaaaaaattgtggcaatgtcctctcactcaggaaaattctgtgtgttttctctaatggccaagggaaaacttgtgagactataaaagttagtctcagtacacaaagctcagactggctattcccagatctcttcaggtacatctagtccattcataaagggcttttaattaaccaagtggtttactaaaaaggacaattcactacatattattctcttacagtttttatgcctcattctgtgaaaattgctgtagtctcttccagttatgaagaaggtaggtggaaacaaagacaaaacacatatattagaagaatgaatgaaattgtagcattttattgacaatgagatggttctattagtaggaatctattctgcataattccattttgtgtttaccttctggaaaaatgaaaggattctgtatggttaacttaaatacttagagaaattaatatgaataatgttagcaagaataacccttgttataagtattatgctggcaacaattgtcgagtcctcctcctcactcttctgggctaatttgttcttttctccccatttaatagtccttttccccatctttccccaggtccggtgttttcttacccacctccttccctcctttttataataccagtgaaacttggtttggagcatttctttcacataaaggtacaaatcatactgctagagttgtgaggatttttagagcttttgaaagaataaactcattttaaaaacaggaaagctaaggcccagagatttttaaatgatattcccatgatcacactgtgaatttgtgccagaacccaaatgcctactcccatctcagtgagacttactataaggacataaggcatttatatatatatatattatatatactatatatttatatatattacatattatatatatataatatatattatataatatataatataaatataatataaattatataaatataatatatattttattatataatataatatatattatataatataatataatataaattatataaatataatatatatattattatataatataatatatattttattatataatatatattatatattatagaatataatatatattttattatataatatatattatatattatagaatataatatatattttattataaaatatatattatagaatataatatatattttattatataatatatattatagaatataatatatattatatttatatataacatatattattatataaaatatgtataatatatattatataaatatatttatatattatataaatatatatattatatataattctaatggttgaattccaagaataatctatggcatgaaagattttacctgtcaacagtggctggctcttcatggttgctacaatgagtgtgtaagattctgaagaactcctttaataagcctaaacttaatgttcaacttagaataaatacaattcttctaaatttttttgaataatttttaaaaagtcagaaatgagctttgaaagaattatggtggtgaaggatcccctcagcagcacaaattcaggagagagatgtcttaactacgttagcaagaaattccttttgctaaagaatagcattcctgaattcttactaacagccatgatagaaagtcttttgctacagatgagaaccctcgggtcaacctcatccttggcatatttcatgtgaagatataacttcaagattgtccttgcctatcaatgaaatgaattaattttatgtcaatgcatatttaaggtctattctaaattgcacactttgattcaaaagaaacagtccaaccaaccagtcaggacagaaattatctcacaataaaaatcctatcatttgtactgtcaatgattagtatgattatatttattacagtgctaagcagaagagaactgaagtgaatgttcatgatttattccactattagacttctctttattcttaaaaatatttaagatcactaaatttttataggactttaaaaacagtaatgtgctgctttgagtgtgtaggactaagaaatgggattcagagtagtaaagagaaaagtggaatttccaagcactatgaattactgttctttaaaaaacagcaaaaatcaaataacagtattcctccaaaaaagatggcaagtgtaaactctataccttcatgtctcccgtggaatgttagtgatcaatttccacttctctcttttacatcttacttgcccattaactcttatacctaatccaaagattgttaatatggctatgcctcactttcaggacaccttttatttgttacttctcttcactgcaaaacttcttgaaacagtacttattttctctcctccatacacaattgaaatggctctcaactcatgcccagaagtcagtgttcagtctctcacctggcagatagcaacttacaaagatgccccaacaatacctccttgtgtctagacagtcatcattatcctttacctttttctgtatttatttctgctcctaaaagggatctctatgtaaagtattgttatactagtgcttgttataattattatcagagttaaagccatcacaatgttcccaattacttaaagacattggaataacattttttttattttccacatcttgccaaaaaatattttgttatcagtaccttaataatggctattatatattgaccattactatttgctagaaaatttatatacctggtcgtatccaatcctcacagaacttctataaagttgtgctattatcacctatattttccagatgtggccgtaagactgaaatcacttaggtgacttgtctaaggtcattcagatacatagtagataacccaggatttgaacacaggcctcctagcacacaagctcatatcttaactactttaatacgttgctcgatgggatcttacaggtcttcattcacccctttcctgctcacacaaccacaacctgcagttattacctactgttaggcttaaaataattacttggcttcatttccaagctccctcccttccaattcacattgagtccagagctaaattaaacaatcattcaaaatttttcagtagttcttgtctctataataaaacagaaatgctttagaaagcattccaaaatctcttaccagttttatctcctatgaaagtccttcacactttctctcatttaaactttattgcattttcctcactttttctcacttcacttttgaattccctattcttttatcctctgttaatttttaagtattatatttgtgatattattttttctttttttctattttttatctttcatttcattttggcctatttttttctcttaagaactttaatatcaccaaataacatgtgtgctacaaactgttttgtagttcaaagaaaaaggagataaacatagagttatggcatagacttaatctggcagagagacaagcataaataatggtattttatattaggaataaacctaacattaatggagacactgagaagccgagataactgaattataaggcatagccagggaagtagtgcgagataaaattatgatcttgttgaattctgaatgtctttaagtaatagattatagaaagtcactgtaagagtgagcagaatgatataaaatgaggctttgaatttgaatataataattctgacttccttctccttctcttcttcaaggtaactgcagaggctatttcctggaatgaatcaacgagtgaaacgaataactctatggtgactgaattcatttttctgggtctctctgattctcagggactccagaccttcctatttatgttgttttttgtattctatggaggaatcgtgtttggaaaccttcttattgtcataacagtggtatctgactcccaccttcactctcccatgtacttcctgctagccaacctctcactcattgatctgtctctgtcttcagtcacagcccccaagatgattactgactttttcagccagcgcaaagtcatctctttcaagggctgccttgttcagatatttctccttcacttctttggtgggagtgagatggtgatcctcatagccatgggctttgacagatatatagcaatatgcaaacccctacactacactacaattatgtgtggcaacgcatgtgtcggcattatggctgtcgcatggggaattggctttctccattcggtgagccagttggcctttgccgtgcacttacccttctgtggtcccaatgaggtcgatagtttttattgtgaccttcctagggtaatcaaacttgcctgtacagatacctacaggctagatattatggtcattgctaacagtggtgtgctcactgtgtgttcttttgttcttctaatcatctcatacactatcatcctaatgaccatccagcatcgccctttagataagtcgtccaaagctctgtccactttgactgctcacattacagtagttcttttgttctttggaccatgtgtctttatttatgcctggccattccccatcaagtcattagataaattccttgctgtattttattctgtgatcacccctctcttgaacccaattatatacacactgaggaacaaagacatgaagacggcaataagacagctgagaaaatgggatgcacattctagtgtaaagttttagatcttatataactgtgagattaatctcagataatgacacaaaatatagtgaagttggtaagttatttagtaaagctcatgaaaattgtgccctccattcccatataatttattaattgtctaggaacttccacatacattgcctcaatttatctttcaacaacttgtgtgttatattttggaatacagatacaaagttattatgctttcaaaatattcttttgctaattcttagaacaaagaaaggcataaatatattagtatttgtgtacatctgttccttcctgtgtgaccctaagtttagtagaagaaaggagagaaaatatagcctagcttataaatttaaaaaaaaatttatttggtccattttgtgaaaaacataaaaaaagaactgtcacatcttaatttaaaaaatatatgcttagtggtaaggagatatatgtcaacttttaagaggttgaaaaacaaacgcctcccattataagtttatacttcacctcccaccactataacaacccagaatccatgagggcattatcaggagtgagtggaagagtaagtttgccaatgtgaaatgtgccttctaggtcctagacatctgtggtataactgctcataagcagtagaaagaatttagagggatccaggctctcatcacgttggcacaaagtatattacttggatccatctatgtcattttccatggttaatgtttaaaaccacaggctttaaagtaaaaaacaaagagctggattcaactctactgactcttattaatcatgattttgggcacattacgtagctttcatgagctttagtttctacatttataaacaggagattatacctattatgcacggttattatgaaggaaaatgacaaaatagatataaatcaaatagcccacttcgagacatattaagcatgaataaacattagatactattaaaatcctatatattaacaaagccaaaagtttcaaactttactttttcccaacattcttgtgaaatatgacacatcccaatcttaacagatgctcatttgggatactgtacttgtgagtggaagtgtgtatatttgtgtgcaagtgtgtactcatatacttccaccttaccaccctagaaaggcatgatgaaaatttaagatagaaggaaaatataaattgaaaaaaaaaaaccttaacaaatgattctgacaaatatcttctctttccagggagaatcactgagccagaataaaattgaacactaaatattctaagaaaaaaggaatctagtttgtcaaaatgtgacttgaattaatagataaggagagtcagatgataagagggtcaaaattatgtttatcttaggaaaagtagaatagaaaatttataagcagattaaaaacacataataaaagtagtaaataataatgacagtatctcaaatcagtgcaggggggaaaggcctactaatgtgatggtgggataattggatagcaatatgggaaaagatatatttaatttatttgctacaccaaatgccaggacaatctctaagtgaattcaagacataactcttttttcaaaaaaactatgcaaatattaaaagaaaacaagttaatgtttttataatctatgaatatggtaaagatggataacattgactatcaaattaatttttaatgcgtaataaaactatgagaaaatttaaaagtgagaagaaactacttgtaactcacataatagactagtacttctaacacatagggaacttctaaaacaaaacccaaaatattaataggaaaatgggcaaaacagttaaacttacagttcatacataaggagaatcagtcttttttttttttttacagttgtaggcagaaaacttttatttttcatttatttgtaaaatttacccctaatttattcataattcatttaactgctaagggcattaatgtgtacaacgccatgggagaaaccagtatattcagaatttctcctgaaatttgaccagaagttatggacatccctcccctgggaaggaggcaggcagaaaagtttggaatctatgtagtaaaatatgttactcttttatatatatacatatatgtgtgtatatgtgtatatatatatacacacatatatacatacatacatacatacatacatacatattatctgaattaggcctggtcttttttaatactttaagttctgggatacatgtgcagaatgtacaggtttgttacacaggtatacacgtgccatggttgtttgctgcacccatcaactcaccatctacattaggtatttctcctaacgttatccctctccttgcctcccacctcccgacaggccctggtgtgtgatattcccttccctgtgcccatatgttctcattggtcaactcccatttatgagtgagaacatgcggtgtttggttttctgttcttgtgttagtttgcggagaatgatggtttccagcttcatccatgtccctgcaaaggacatgaactcattcttttttatggctgcaagaaatgcaaatcaaaaccacaatgagatgccatctcacaccagttagaatggcaatcattaaaaagtcaggaaacaatagatgctggagaggatgtggagaaataggaatgcttttacactgttggtgggagcgtacattagttcaaccattgtggaagacagtgtggtgtttcctcatggatctaaaactagaaataccatttgacccagcaatcccattactgggtatatacccaaacgattgtaagtcattctactataaagacacatgcacaggtatgtttattgcagcactattcacaatagggaagacttggaaccaacccaaatgcccgtcaatgttagactagataaaatgtggcacatagacctggtcttaaaatcaagaacagagattgttacttttacatccattcctaattgataaaccattcagttataccacatcttagcttctggactacaatgaccatatttggggttttctttctaatttcattataggttcagagggtacatgtgcaggtttgagacaaaggtatattgcatgatactaaggtttggagtacaaatgatcccacctcccaggtagcaagaataatacccaatatgtagtttttcaactctttcccctcttcctccatcctccctctgctactctgtggtgtctgtttttctcatctttatgtccatgtgtactcgatgtttagctcccccttgtaggtgagaacatgtggtatttggttttctgtttcagtgttaattcacttaggataatggcctccaactgcattcatgctgctgcaaaggatgtgactttcttcttattagctgcatatattttgtggtggatttgtaccacatttactttatctagtccaaagttgttgggcacccaggtggattccatgtctttgctattgtgaatagcactgggacaacccatacaagttcatgtgtctttttggtaaaacaatgtattttcctttgggcatatatgcggtgatggaattgctggatcgagtggtagtttaactcttagttctttgagaaatccccagactgttctccacagtggctggactaagttgcattcccaccagcagtgtagaagtgttccccattctctgtagcctcaccagcacatgttaaactatctttaaatatatgaaaaaaatgttcaagtctctcagattaagatgcatgcaaagtaaaatgatacttaaatatcagttctaacctataaaatatcaaatatctgacctcaatatttgataatccaacctgttgatgaagctgtagagagaggcactctttttttttttttttaattatactttaagttttagggtacatgtgcaccttgtgcaggttagttacatatgtatacatgtgccatgctggtgcgctgaacccactaactcgtcatctagcattaggtatatctcccaatgctatccctcccccctccccccaccccacaacagtccccagagtgtgatattccccttcctgtgtccatgtgatcttattgttcacttcccacctatgagtgagaatatgcggtgtttggttttttgttcttgcgatagtttactgagaatgatgatttccagtttcatccatgtccctataaaggacatgaactcatcattttttatggctgcatagtattccatggtgtatatgtgccacattttcttaatccagtctatcattgttggacatctgggttggttccaagtctttgctattgtgaataatgccgcaataaacatacgtgtgcatgtgtctttatagcagcatgatttatagtcctttgggtatatacccagtaatgggatggctgggtcaaatggtatttccagttcgagatccctgaggaatcgccacactgacttccacaatggttgaactagtttacagtcccaccaacagtgtaaaagtgttcctatttctccacatcctctccagcacctgttgtttcctgactttttaatgattgccattctaactggtgtgagatgatatctcattgtggttttgatttgcatttctctgatggccagtgatgatgagcattttttcatgtgttttttggctgcatagatgtcttcttttgagaagtgtctgttcatgtccttcacccactttttgatggggttgattgtttttttcttgtaaatttgtttgagttcattgtagattctggatattagccctttgtcagatggtaggttgcgaaaattttctcccattttgtaggttgcctgttcactctgatggtagtttcttttgctgtgcagaagctctttagtttaattagatcccatttgtcaattttgtcttttgttgccattgcttttgtcccactgatcccacagaaatacaaactaccatcagagaatactacaaacacctctacgcaaataaactagaaaatctagaagaaatggataaattcctggacacatacactctcccaagactaaaccaggaagaagttgaatctctgaatagaccaataacagaagctgaaattgtggcaataatcaatagcttaccaaccaaaaagagtccaggaccagatggattcacagccgaattctaccagaggtacaaggaggaactggtaccattccttctgaaactattccaatcaatagaaaaagagggagtcctccctaactcattttatgaggccagcatcattctgataccaaagccaggcagagacacaacaaaaaaagagaattttagaccaatatccttgatgaacattgatgcaaaaatcctcaataaaatactggcaaaacgaatccagcagcacatcaaaaagcttatccaccaagatcaagtgggcttcatccctgggatgcaaggctggttcaatatacgcaaatcaataaatgtaatccagcatataaacagagccaaagacaaaaaccacatgattatctcaatagatgcagaaaaggcctttgacaaaattcaacaacccttcatgctaaaaactctcaataaattaggtattgatgggacgtatttcaaaataataagagctatctatgacaaacccacagccaatatcatactgaatgggcaaaaactggaagcattccctttgaaaactggcacaagacagggatgccctctctcaccactcctattcaacatagtgttggaagttctggccagggcaattaggcaggagaaggaaataaagggtattcaattaggaaaagaggaagtcaaattgtccctgtttgcagacgacatgattgtatatctagaaaaccccattgtctcagcccaaaatcttcctaagctgataagcaacttcagcaaagtctcaggatacaaaatcaatgtacaaaaatcacaagcattcttatacaccaacaacagacaaacagagagccaaaccatgagtgaactcccattcacaattgcttcaaagagaataaaatacctaggaatccaacttacaagggacgtgaaggacctcttcaaggagaactacaaatcactgctcaaggaaataaaagaggatacaaagaaatggaagaacatgccatgctcatgggtaggaagaatcaatatcgtgaaaatggccatactgcccaaggtaatttacagattcaatgccatccccatcaagctaccaatgactttcttcacagaattggaaaaaactactttaaagttcatatggaaccaaaaaagagcccgcattgccaagtcaatcctaagccaaaagaacaaagctggaggcatcacgctacctgacttcaaactatacgacaaggctacagtaaccaaaacagcatggtactggtaccaaaacagagatatagatcaatggaacagaacagagccctcagaaataatgccgcatatctacaactatctgatctttgacaaacctgagaaaaacaagcaatggggaaaggattccctatttaataaatggtgctgggaaaactggctagccatatgtagaaagctgaaactggatcccttccttataccttatacaaaaatcaattcaagatggattaaagacttaaacgttagacctcaaaccataaaaaccctagaagaaaacctaggctttaccattcaggacataggcatgggcaaggacttcatgtctaaaacaccgagagaggcactcttatgcattgttggtgagaatacaaaatggtacaactcttggcaatatcttaaaaaatttacatggtactgacttttggtctagcaatcctacttctatcctaaagatatattggcaaaaatacaaaataattgatgcacacaagtctattcattgaagcattgtttttcatagtaaacggaaagtaggccgggcgtggtggctcatgcctgtgatcccagcattttgggaggctgaggcgggcagatcacttgaggccaggaattcaagaccagcgtggctaacatggcgaaaccccatctctaccaaaaatacaaaaattagctgggcgtggtggtgcacacttgtaattccagctacttgagaggctgaggtgggaggatcgcttgaacctgggaggcagaggtttcagtgagcccagaacgtgcctctgcactccagccaggatgacagagcaagactccatctcaaaaaaaaaaaaaaaaaaaaaaggaaaataaccaaatgacaattagtgagtactacttgcaaaacttgtacgcaatagagtatgaagcaactataaaatgagagagaaatatctccaaatactactctaaagtaatctacaaggtataccttaactgaaaagaaacaaaaaagtgacaccagaatgctatttttatgttaaaacagggataaatacattggatttacatgcatatataagtatatattttataaatgtttaaataagcatacttaaaatggcaaaaacataatacatatataattttcttatggcaggaggaggaaacagggcaaggcacagggataaaagttattctgaatacatcttattttatatttttgactttgaaatcatgtagctgttttatgtaatataaaaatgtaattaaattaacagaaaaaaattacaactgctaaaaatcaagatctggctttttaattaagttataaaacatcggagaaaagaattgtttcatgggacactaacatacagacaaattcatttggaacccaatgaattaatgggcctaagataacaaccaatagaagctaaaatgacgaataactgtttcagaagaaaacatatatggaatgaatcagctgaaaatacctgaacctactgatcaatttttatatgtcacatgaagtgaatacacataaagtataatatggagcacatagaaccaactagaaatgagcctaattggtaaatattctctattttatgacaatatacaggaaatatgtcgaagagagaaacatgcaagaacaccgtagggtttaataagataatcacaaggtatggaatattcaacaggatgaatatcctggattattcagcaaatacacagagctaaaaagcaggagaaaggaattcatatatatttttaaaaactaaaaagatatattagctgatgcaactttgaaacttctttagatcctgattcaaatagagcaaatttaacaaatatatttgaaactattaaaataatttaaaaatgactaagtatttgattatatcaaatatagacaataataaccttgaatgtacatggattaaatgtccacttaggggctgggtgtggtggctcatgactataattccagcactttgggaggccaaggcagaaggattgcttgaggtcagaggttcaagtgcagcctggtcaacacagtgaaaccctatctctacaaaaaacaaacaaaaataaaaaattaactaattttaaaaaatatatatttcttctaaattctccacctgaaagatatagactgactgaatgaattttaactatgatctgactatgtgcttccctgaacaaatgcactttacctgtaaaacacatattaactaaaagaaaagagatggaaaaaggtattccatgaacagaaaccaaaatgagtaggagtagctatacttctgtcagacaaaacagactttaagtcaaaactagctttagaaaaaagacaaaaatgcttattatacaacgataaaggaatcaatccagaaagaggatataacaattttaaatatatatgcagccaacactggagcagccagattcataaagcaaatactactagatcaaaacagagaggtagactcaaatataataatagtgaaggacttcaacaccccactttcagcattaaacagatcatctaataagaaaaccaatctcgcagccctcaccctggagagtccacagggaccaggggttggtctgaacccccagcacagagcacctgcctcacagaagagtggctgcatttttcttcctgcagttttcagtcctcacttctccttaccaagcagggccgcctggcctgggactcctgtacaactaccctgccccccacctgaccacttcaataagaagtagcccagcatttctccaaggaggaaataccagagtcaattcacaaccactgcaattgtagtggtaccaccataacagcccttgggctgcagaaggaactaagagtctaatcactacagtggcaccttcagcacaccacagccaccatacagagaggaatccagccccctcccctgggaacccccaccacccactccaccaggcacagcacccagctcataactgcagatcagttgccccacccacagctgagcttacctactggcagtggcccagactttccctagggagaggctcccagaggcaaacggcagcctctctgcccctgtcacagcagcagttctatccatgctgtcctcaggcttggaaagaaacaaagcgcctgaaggctgcacctgaacttacagcatgccacagttcccatacggagaggagaccagtctcttctcccagtgagccctaaaccccctgatccccaacaagcagagccctaacctcacaccagcagtacagctgctccatcccccaggctgaacattcccagtaatagcagctccacctggagatggagcccccagggtcaaccaaaagcccctctgccactgcctctacagtggtactacccctgctacccttgaactaacaaaggagcaaagaccccagtgctttatccacacctccaacaagctgcagtcgaccacaaagaagaaacaagtctgtctcccatgggtcctacccacaccccctgctgttcaccatgaatgatagagtcaacagtgtgaaaacgaccatactgccaaaagcaacctacaaattcaatgcaattcccatcaaaataccaccatcattcttcacagaactagaaaaaacaaggctaaaattcacatggaaccaaaaaagagcccacatagccaaagcaagactaagcaaaaagaataaatctagaggcatcacattactcgacttcaaactatactataaggccatagtcaccaaaacagcatggtactggtataaaaataggcatatagaccaatggaatagaatagagaacccagaaataaagccaaatactttcagccaactgatctttgacaaagcaagcaaaaacataaagtggggaaaggacaccctattcaacaaatggtgctggtataattggcaagccacatgtagaagaatgcaactggatcctcatctctcaccttataaacaaatcaactcaagatggttcacagacttaaatctaagacctgaaaccataaaaattctagaagataagattggaaaaacccttctagacattggcttaggcaaagacttcacaatcaagaacccaaaagcaaacacaacaaagataaatagatgggacttaattaaactgaaagccttctgcacatcaaaataaataatcagcagagtaaacagacaacccacagagtgggagaaaatcttcacaaactatgcatccaacagaggactaatatccagaatctacaaagaattggaacaaatcagcaagaaaaaaaaccaaacacaaggatgacagtggaaatacaaaaacaagacataaatattctgaatagtgataataaaacagtgcataccagaatacaaactgtttccaagttacaatggttcaaccatttttcagctttatggtggtgtgaaagtgatatccattcattagaaaccatgctccaggatgggcgcagtgggtcacgcctgtaatcctagcactttgggaggccgaggagggcggatcacaaggtcaagagatcaagaccatcctggccaacatggtgaaaccccgtctctcctaaaaatacaaaaattagctgggcattgtggtgcgtgcctgtaatcccagctattcgggaggctgaggcaggagaatcacttgaaccagggagtcggaggtgttgcagtgagccgagatcgtgccactgcctccagcctggcaacagagtgagactccatctcaaaaaaaagaaagaaacccgactccgaattttgaattttgatattttcctggactaccaatatgtggcacaatgctctctcacaatgttgtgcaacagcggtgagctgcagcttccagtcagccaaatgataataaaggtagataatccatcttgatatcttcctgaagaacataatgcctgcctaccatcaacaggcatcaatactttctaccagctattctcaaccctcatgatcggaagagacagagactgactgtgtcaaagtattagtcccatcattcagcaattaaccttagctcaatgcttcaaaaattcttcaggccctgtgtaatttcagctacgtacattaatgataagtacccatacaaccattctgtttcttattttcagtaccatatttaataaatatcagttattcaatactttatttagacattttgttagattattttgaccaactgaagtctaatctaaatgttctgagcatgttcaaagtaagctaggccaacctataattttcggtgtgctaaatgcatttttaacttatgatattttcagtttacgggggtttgttgagacataacttcatcatacatcaaggagcatctgtatatgggatacagttaaagcagtgatcagaggaaaatctatagccttaacacatttattaataaaagtgtaggaattaaattatcagctgaaaaatgtaaaaagtatctaaaagagtaagcagaaagtacaagaaagaacccaaagtagaaaaaagtgaaaattaataaaataagaagccaaaaaacagatcaaatcagtaaaccaaaaatcttgttctttaaacaaatcaacaaagttgacaaaaaaattagatcttttaatcatgaataaaaaaaaagagaaagcacaaaaatgaataaggaatggtgagagaaataactattgataatcagcaaataaaaaatcattaaaaacaatgttgttcacatctatgaaaaacattgaaagctagagggaatgggtaattttctagaaaaatacaattcaccacaactgacttcaaaaaaaaaaaaaagaagtacagcacttatgtgagcaatttccatagagaaatacagttgtcatggaattataacacacacacaaacactaggtttagatgttttcacggagaattccaccaaacctttagaaatcagatcgtccaaaggcaaattaacaaccctcagccatttgcggcaaaatattacaattgaggcaagatatactgtactgaaaacttgaggaaaaagcaggagagaaagttcctttgggaaattcgaatactcaaaagtgcttacatacaatgaaaaatttggaaatccataagcatggccaaggtgggacacatgctcagaaaaggcctgagaagacactaataactcacctttagtaattcctaggctcacagcaagaaaaaatgaaggctaaggcagaattatacatggctccgctaagtgttgagggagccccaatacagagtcagtaagcaaagtctgggagatgtttttcatatttttttcttttttggctacttgcagtcaaggaaatcatttttaaatcactaaatgctaaatgaacacaagctaaaggaaccgagccgccttcaaacatcaaacataaaaaagaatgcagatattacaaaaccagtttacaaaagttactaaacaaataaaaactacatcccacagtgggtaacaaaaataaccttgaagaagggaaaaatttggtttccagaataaacacattataatatccaaaatgtccagttttcaacaaaaattaagaagcatgcaaataaacacaaaactatggcccatttacagaagaaataaatgagactctccctgagtaagcagatattggaaatattagacaaaaactttatataactgtcttaaataaacttaaagagctaaagaaacccaagagaatgacatataaataaataagaaatatgaattttttaaaaggtacaaaaaaattctgaggctgaaaagtacaataactaattaaaaagttactttttacttagggttccaatagaagatttgagcagctggaaaaaagaatcagtgaacttgatagatcaagtgaaatgattcagtctgaagagcaggaaaatgaaagaatgacaacaaaaaagaatagagcctaaagacctgtgtaacaacatcaagaatgcctacatacagaatcctggtggggagtgaggggcaggaagactatttgaagaaatgtgtttgaaagcttcccaaatttcactaaaaacaaatatatacattcaaaaagctcagtgaacttcatcaaggaaatatacaaagatattcacaccaagacacactatgtttcaaattgtcaaaaggcaaagcgaatgtttgaaagcagcaagagaaaggcaacgcgtcatttacaaaggatcctcaataagtttgacagcagatagtgcattataatccatggatgccagaagagcttaggaaaaaggcaatgcatcatttacaaaggatcctcagtaagtttgacagcagagagctcatgataaaccatgggtgccagaagagcttagaatgacattttaaagttctgaaagaaaaaaacactgtcaaccaaaaattctgtaacttggaagatgccccttcaagtattaaggataaattacacattcccagattaaaaaaaaaaagagagagagaaagagaaagaaagaaagaagagagagaaagaaagggagagaaagaaaaagaaagaaagaaagaagagagagaaagaaagggagagaaagaaaaagaaagaaagaaagaaagaaagaaaaagaaagaaagaaagaaagaaagaaagaaagaaagaaagaaagaaagaaagaaagagaaagaaagaaaagaaagaaagaaaagcaagcaagctttaaaagttcatgtttggtaggctgtacttcaagatacactttaaaaaaaaaaagactccttcagatacaaactaaaaaacactagaaagtaactcaaaaccacataaagaaataactccagtaaggataactacataggtaaatataaaaggaattatcatattttttgtaagtctttttaaatattctatatgttttaaaacaaatgtgtaaaataatgactataaatctatgttaatgaagcatgatgtataaagatgtggtttgtgaaattaccaacataaagaaattcataggaaactaaataataatagagattttgtatactattgaagttgtttcaatttactctaaattgttccaaattaagaatgttaattgtaaatccccatggtaaccactaagttaatatcttttgaaaatacagaaaaggaaagcagagggtaaacacagtgatatgctacaaaatagcaactaaacacaaaagaaggcgataattgaggaaattaggaacaaaggaggtataagacatacagaaaacaaaagcaaaatggtaggagtaagcccctctttatcagtaattacattaaatacaaatgaattaaactctccaatccaaagaaagagattgacagaatggatttttaaaaaatgatccaactatattgtccacaagatactcactttagatcaaaatacacaatgcgttgaaatgaaaggatgggagaaaatattccatgtaagtaataaccaaaggagatctgaggcaaatatacttatatcagacaaaatagactttaagtcaaaaactgttacaaaatacaaagaacagtatatattgatttcaaaattaaacaagaagatataacaattataaatatatgtacaccaactaacagggctccaaaatatataatgtaaccattgagagaattaaagggagagacagacaattccacgaaaattgttgggcattttaaaacccaactttaataaaggacaaaacatccagagcaaatatcaagggaggaattagaggatttgaataaaactataagcaataactatagataacacttctctcaaaaactgcagaatacacattcttctcaagtgaacatggaacattctccagcacagatgatatgttaggccataagataagctcaataaacttaaaaagattgaaatcatgcaaagtatcttcactgaccacaatggaatgaaataagatatcaataacaaaagaaaaactagaaaatttacaaatatttggaaattaaacaacacagtatttaccaaccaatgaatcaaagaacaaatcatgagggaaattagaaaatgtttagagacgattgaaaacaaagatataacaagatgggtgtgatatatcaaaagcagtgctcagagttgtaacacctacattttaaaaaagaaacatgtcaaatcaataaccaaactttactcaataaaccataaaaggaagagcaaacaaaatccagagctagcagaaggaaggaaataaagattagagcagagataaatgaaattgagaattaaaaaattatacagagatcaacaaaactaaaagttggttcttttaaaatatcaataaaattaatatacttttacatagactaagcaaaacatctctattcagctgacttttttttacaagggagccaacattattcagtggggaataatagctttttcaacaaaaagtgctgggaatactgaatattcatatgaaaaaaaaatgaagctggacccctacctcacattatatacaaaatctagattggatcaataatgtaaatatacgagtgaaaaccatacatgcttagaagaaaacatggaaataaaacattgctgtggattggcaatgcattcttagataatacaccaaaaatacaagcatgaaacaaacaaatgtagccaaaatgtaccagaatctgaaaacatgtattatctataaagaattagaggggaatttggtgaaagaaatatgggagaatgggatattgctctgtgaatgcttttgtgcataattgtacatttttaattaagttaatcttttacactctcaaagtgtgatattaagcaagcaaagataagttattacaagactctaaaaccgaatgcaatgagaaacaagtgaatccaaatatatttcaaatgaatgaatgacataatcaaacttaaggggaaaataataattaatctgattaatttttgactgttctcttatttcaaattgacttttgaacatactttgactacatactattgcttgaaaaaataaaatatctgcaaaaaattattaaatcttcatgataggattttttctttttatattagtataaatataacaattctgaaacaaatgtatgtgcattgtaagattaagccaatgagtaaatattaatatatttgtattgctagaaccccagattctcactgtgaaaggacagagatacagatatggaataagacaaggaaagaagcagcccactgagttacattagaatcagtattatcaacataaatatgcaatgtgctctctcacatgctctttccttctcttaaaaaaatataatatgtacatattatatattatatgcatagacacacgtgtgtctatacatatcctatctatacatattgaggattaacaggtgctagtagaaaatattaactttctttgtattaacaggtgttagtagaaagtagtagtaggtgctaagataaaagccataattaaacctcctggtgaatgaacacaccatcacctacaatcttaccaaaaatagaaccaagcacgtgtcctagtcaaacctctggattcaactgtcatttggataaaacgcaaaggatagtgaaaatgtcgatcttcactgagagtctcaccagcaaatttcacagtgtggacatcaagtgacaaaaatcccacatttttcaacaaatatattgtatgggaaagaaaactttgaaaagaaacctgtatgttagaagggattttaaaaacacgacaaatgaaaacaaatgcgcaagactaaatcatagtgtcttggaatgcatgcatgaaggacacagccgtgaaaatgcaaggacgcctctactggaacagtcacgtttatcgtcacttttcaggagaaaggtggctgcaactgaggagagtcacatgcaggacttcagggctggcaaagtcctatatcttgacttatgtgatgattacagggatgtttacaaaaatcaaactataagtttgttttgtgccatgttttgtattgtgtgtgtgtgttttgtttttcaacttaaaaatacataaaatcaaaaccaaggcttcattatcaagtagcacaaagtctccaatctataacctcctttgtctggatatctgcatttaactaccattgccagagctaatcctgacaatgcattcatatttttaacactgaaacacagtaaacagggaaaattttgctcctctaaaacagggcatcttcaggcaatcagaacaactcagaaagtttctgtctgttgcataaaactcccctgtgcaaagagttacacaaaatgctgtcatagtaaaggtagttaactaacggcactaattgttcttgggcagtggccaagtggaacttcagagacctggcattgccagccagaaatcacttgtcatgggaattgtctcctggaatcactttggttgtcccagggtaacgcagggaaagtggttaatgggtcacttgggggtggcatcttcatcagtaaatcacatttactttctcctactaagaattttatttttggccatgaagccaaaagtcagctcttaaataacaagggaagcaaataatcattgaataaaaatagcagaaagaaaaagctgtgcaaagaaatttatgtttttaatttgttatatatgtatatttttatcatactttaagttctagggtacatgtgcacaatgtgcaggaataaaatttatgtttttaaaatttattctacattatgaattctacattagaaaaataaaccatagcctcatcacaggcacttaaatacactgaagctgccaaaacaatctatcgttttgcctacgtacttatcaacttcctcatagcaaactgggagaaaaaagcaatggaatgaataaaatgatagccacaaaaatcaaggtgggagaaatacttattatatgtccataaaaaattttaattaatgcaaagtattaacaccaatgattgcagtaatacagatcttacaaatgatagttttagtctgaacaggactatccaaaagttaattttctatagtaacagtttttaaataaaatatcaattcctgaaacacataaaatggtccatgagtatacaacgagtgaaaaaaaacaaattcagagcaaagataaattaagaagtatctaatattcaaacatagtcaaagagagggagatttctggataatcacttaagcccatggttaaacataaatgcaaatatgttaatgtttactgaataacttatctgtgccaagtggtgtattaatgattcatttttatttttcactaaatcttttctctaaagttggtgtagcctgcaactaaatgcaagaaatctgacctaggacctgcacttcttaccattttgctcatatttattccctgtgcatttttgtaacatgtatatgttatatatatagaaagagagagaggcagagatggaaagtaatttatggagtttgatgttatgtcagggtaattacatgattatataattaacaggtttctttttaaatcagctatatcaatagaaaaataaatgtaggaatcaagagactcattctgtccatctgtgatagttccatcatgatactgcattgtcaagtcattgctccaaaaatatggtttagctcaacactgagtgactataggaaaccagaaaccaggctgggcgctaaagatgcaaagatgaatgagacatcatctctgccgtccaaaagcttactgtctagtgggagagttacacacgtaaggacagtaatctaataagagctaataagtgaaaactaagataaattaataatacaagattacagggaaggtttccaaagtcaatgaggcctcaaatgaatcttgaaagtgtgcaaggattaaccaaatgaagaaatgtgtaagtttttcaaacaaaaaggaacagcatgagcaaatgcaaggaggcctaaaataaagagatgtgtaaagaggtgtaagcagctttgtgctactgcctgataattagaagaatatcgggagtaacaagagctatagaagagagtcacaattatggaaaaatatttattaaattataagaaatttatagcataaggaatagtaggaccattaaatgttttaataaagatgatgcttctttttttaatatttatttttattatactttaagttctagggtacatgtgcacaacgtgcaggttacatatgtatacatgtgccgtgttggtgtgctgcacccattaactcatcatttacattaggtatgtctcctaatgctatccctcccccctccccccaccccacaacaggccgcggtgtgtgatattccccttcctgtgtccaagtgttctcattgttcaagtcccacctatgagtgaaaacatgcggtgtttggttttttgttcttgagatagatgatgctttaaattgaccactctagctgcattgtgggaggaaaaaaagattttaaaacaagactagaaacagaataattagaaaaatgcaactacaatgcagatgagtgattatcaaggtctgaactgaatagtggaaatagagataaggaggcaaattcaagatatgtgcgtgacagtaaaattaacatgacctagtgtttgattgactctgtaaagtgaaaggaaaggatgaataatcaacaaataatatttattctaccaaatgcctccatgccgctttgatgacaggataatatgtaagcttttctatatttcagaaactatatgacatgacgaaaagtaaaaaggggatgggggtaaggaggtatcctgaattgactgagaaataaggaggtattccacagagaatataaataaacatatacttagtgttcaaggaataataaaaaagagaacatctatgtgtccaccatacaggatatgaaatagaacatttgccggccatggtggctcacacctgtaatcccagtactttgggaggccgaggtgggaggatcacttaagcccaggacacaggttgcagtgagccaagatcacactatcgtactccagcctgggccaccatgtctcagaaaaataaaaaaaactagatgtcttggaggattggaaacaaaatagaactttactagtgccttagacgcccattgggtgctccttgccaattgtgttctcctttatttcctgctggatatgaccactgtccttccattgcattgtatgtgttttttaatagactttaatggttctcaagtgatgcattatttagtttggttctttgaaacttatataaatgaaattattttgtagaagttctttcacctttatcagaaggtactttcaccttgattcaataataagtttgcatattacaaccttgttgaatgttggtgtaattcatccattcgtattgctatatgatattccactacatgaatatgtcggacttcattcctcagatctattgttgatgaacacttgaaatttttccagtttttaaccattacaaacaatgctgctatgaacattcttttgtaaatcacctggttcatatgtgcaagatatcctctggggtatatatttaaaagtaaaattattgagttattcaacattaccatgagatgctacactattttttttaacaatcctaccaatttacacttctaccacgaacagataagcattaccgttggtcttcatttgtaggaaccatatttgtcttttgctctgggggctttgttttgttttgctttgttttttgcttagaagtgctttggctattagggatctttttttggctccatgtgaactttaggatttttttttaattttgtgagaaataacgttggtaatttgatgggaattgcattaactctatagattgtatgggtgatatggtcactttagctattgatttttctaatccatgagcatgggatgtttttccatttgtttatgtcatctataatttctttcattagtattttgtagttctctttgtagagatctttcatttatatagttatgcattcctaggtatttttcatggctattgtaaattcagttgagttcttaatttggttctcaacaaattaatctcaacaaacattcaaacagcttgaatgtatttggtgtatagaaatacaactgatttttgtggcttgtttatcccaagactttactgaagtcgtgtatcaagtctaggagtcttctgaagactttagggttttctaggcctacagtcatgtcatcagtgagcagagatcatttgacttcttttctaatttgtataccttttatttctttctcctttctgatagttctggctagcacttccagtactgtattgaataggaatgaagaaggtgaacatccttgcttttttccagtttctagaagcaacacttctaacttttgcccatccaggatgatgttggctgtggctttgtcatagatgactcattttttgaggtatactccatctatacctatattgttgagggtttttatcataaacagatgttggattttatcaaatgcttattctgcatctaatgagatgatcatagggtttttgttctcagttccatttatgtggtgaatcatgtttattgatttgtctattttgaaccattcaagcacccctggaataaagcccgcttgatcatgatgaattatctttttgatgtgttgttagcttcagtttgctagaattttgttgagtatttttacatctgtgttgatcagggataaggatttgtagttttcttttgtgttctttttaaaattttccttgttaattttactgcacagtattattttaatgatgaataaagtgttgagctggacatgtgtaccttgttcctcgtgttagaatgaaactgtttaatatgtcatgattatttataatgttgagagtagtttttgtgtatatattaagatatttacatcagttctcttctattcctagtttgttattattacaaatagtttcaaatgtgaacaagtgcttttcccacagctattgaaataaccatatttttttcttttattcagttaatgtggttaatttcattgtttggttttctaattttaaaccatacattcttgaaattactgcacttagtcacgatgtatttttctttggagtatattgttggattatatttgcaaacatttttgtttagaattattatgtagtatattagtctgtaatttcatttcttttaatatccttgtatggttttactatcatggaggtaccaccatataaaacaagttggaaagtgttatgtcttcccaattctctaaaaatattcatgtaacattggcattatttctttattaaatatttggtaatatttctttattaaatattgcatccacctagccctggagttctttctacaggaaaaaaaaattttctaaataaaatttctacaatgaaaaaaaaactactcagtttttctagtttttttctgatcatttcataaaagtaggtatttttcataggaacttgaccattccttatgattgtcaaatttattaatataaagtttcatattttatatttattttatcagataaataaaattatatgttttgaaatatatattcattgtaaaatagccatgttaagctaacatatgcattaccttacatgcttatctttttttatgagaacacttaaaaatctactcttagcaattttgaagaatacaagtacatcccctatggagaacagtttgaaggctcctcaaaaaagtaaaaatagagctaccatgtggtccagcaatcccactgctgcatatataccccccaaaaaagaaatcagtatatcgaagagatatctgcactcccgtatttgttgcagcactattttcaatagcgaagttatggagtcaacctaagtgtccatcaacagatgaatgaataaagaaaatgtggtacttatatacaatgaagtattattcagccataaaaaggaatgagaccctgtcatttgcaacaacatagatgaaactggaggtcattatgttaagtgaaataagccaggcacaaaaagacaaatactatgtgttatcacttatatgtggaatccaaaaagcaaacaactgaactcatggagatagagagtagaaggaagtataccagaggctgtgaagggtagtgggggttgggagaggtgggggatggttaatgggtacaaaaaaagaaagatttaataagacctagtatttgatagcacaacagggggattgcagtctaaaattcaattatacatttaaaaataactgaaagagtataattggattgtttataacacaaataataaatgcttgaggggatgaatatccaattttccattatgtacttattgtacattgcatgcctgtaccaaaatatttcatgtaccccataaatgtgtacacctgctatgtacccacaaaaattaaatttaaaaacaatacattgttatccactatagtcaccatattgcacaatagatctgttgaattcattcctcctgtacaatgcaattttgtaccctttgaccaacatctacccaatcctcctggtaaccatcattctactctgtacttctatgtgttcagccttcttagacctccacatacaagtgagattatgcagtatctggctttctgtgcctggattattttactcagtataatgtcctcccggttcattcatgttgtcacaaatgatactttttttattttttaaggttgtatactattctattgtgtatgtgtgccacattttcttcatccactcatgtgtcgatggatacttaagttaattccacatcttggctgttgtgaataatgctacaataaatatgggagtacagataactcattgacacactgatttgatatctttttaatatatgcccagaaatagcattactgaatcatatggtaattctatttttacagaatcatttatactgtcttttacaatggctgaaatagtttacattctcaacaattacaaggttttccttttctccacatcctctccaacacttggtatcttctgccttttctgtaacagccattctaacggatgtgaaatggcattttattgtagttttaatatgcatttctctgatgatcagtgataattagcatttttatatatctgttggccatttgtatgtcttcttttgagaaatgtctatttagatcctttgtcaatttttcattagggttccttgttttcttattattgtgttgtttgagttcctaagatattttggacattagcctcttatcaaatgtatagtttgcagataatttctcccattttgtaggttatcacttcactctgttgactttcttttgctgtgcagaagctttttaggttgatgctattccatttgtgttttgttgcttttcttgcctgtgctttagagtcatatcataaaatattattgcccagaccaatgtcttggagttattcccctgttttcttctaggagttctatagtgctaggtcttacatttaagtctaacttattttgaatttatatttttatatggtatgaaataagggcctaagatcaatcttgtggacattcagttttctcaacaccattttttgaagagactgttctttccccatgtgtgttcctggcacctttgttgaaagtcaattgactataatatgtagatttatttatgggctctttattctgtgtaattggtctatgtgtctgcgtttatgccagtaccatggtgtttcgattgctatagctatgtagtataatttgaagtcaggtaatgtgatatctcctgccttgcttttttcgatcaagattattttggcttttcagagttttttgtgattccatacagatttgagagttgtttttctatttctgtgggaaaatgtcataggaattttgatagagattgcattcaatatgtacatcactttggatagtatggacatttcaaacatattactttttccaatccatgaacatgagatatctttccatttatttgtggcttcttcaattgttttcatcaatgttttgtagttttcagtgtaaagatcattcacctctttgtttaaatttacatctaagtattttttgttgctattataaataggattgttttcttgatttctttttttgtatagtttgttgttgatgtgtagaaatgctaccgaattttgtatgttcacattgtatcctgcaactttactaaattcatttatgaattctaaattttttggcagagttattggtgttttctgtatataagatcatgtcaactgcaaacagaaacaatttaacttcttcctttccaattttcatgccttttatttctttcttttgcctaattgctctggctaggacatccagtactatgttgaatagaagttctgagagtgggcacccttgtatgaagttttccacaacatctcttatctttttattagctatatattaatacggatgtttcttcttcatcaggagtttgaaaaatatgtcttttctctatattgttcttaatcagtcttcctagaagtatttcaatttcaaaaagtagcaacaactgtgggagttcagtcaggctggtgggaaaaattttaaagatagttataagaaatcgacacaaaccttcatggaaggctgggggtgttgtatagcttcagtaatagatctgaatgaaggcggcctaatccttccttgagtaaatagcttaaagtaggtgcaaaggaatgtaagggagtttatctaaataacttgtttactcatgtggtcctgaagccaacctttgatcattcacaggcaggatggctctctctcgggggagggtgaccaggttaattaccctctatttgtgttgactaaaagcccctgtcatttaatgttttttcaataaatgctggcagggctagctagtcagggctcgtggctgccagaactctttctgtgcatggcccagccccctagcggctctttcactgaataattggtgtctgagtacattattcatccctcgtgcagctggggtctgcaggacagacccccacaaacaacaatttgcaaaagcaaacttccctgttttgtttttttcccaagatgataaattagaggcttttagtgtgcctcggccacttagaaatagcaagagagtgcacaaaggtcaactctgtgagctctaagtcaagaaggaaaatgggaatccaccagaatcatgaaggacatcatagatcccaagaaggagaatgtgagcaaacagtcaacatgacagcaaccagcttataaaagtgagcgaagtcctagtatgtgagagaggcagagagcctccctctgtaactgacattttcactgtgaatctgagcaaccccagccaagttgttgcattttgtttctcccaaggcctggagtcaacatggggagaggcttggagatgctgtgaagcaaagacactgggaacagctgcagacattttcccagaccaggaagtaagagcaagatgccattttcaatctggatgcatgcaaagtcagcttttttttttctttttgtgacccagcagaatgcctgcacaggcattttagtctcaggccaaagattggaacaactgctttggggcttggtagggaccttcacagccatattgtggaaaacacctcagcagtatgtgctggaattgtgctttcccccatcgcagcctcggggcaacagaaaagctgctacagctgtaatttctcccaggtgatgaaacttgcagccagggccagcttggagacctacaaccagtctgcaggtgtcattgctgggtgccccagcctgttcccctgagaatgtgatacagcagggctttctctgcttcacccccaggcagaaattcaggcattggagcacctgtctacctggaccagcatcctgagctaccccaccgtttataaacataggttgtggtgcagtggggccctctccagtctatggccaggcagatttccaggtatgtggagtacccacttgactggatcagcagcctgagcttccccaaccttcctgtgctgagattatagtgcagtgaggccctctcatctccacacataggcagacctccaagcaattagagcacctgctcctatggagaacttaaatttacaagaaaaaaaaaaaaccatcaaaaattggccaaaggacatgaacagacaattctcaaaagaagacatggatgtggccaacaaacatatgaaaaaaagctcaaatcactgatcattagagaaatgcaactcaaaaccacaatgagatactatctcaaaccagtcttaatggtgattatcaaaaactccagaaacaacagttgctggtaaggctgtggagaaataggaatgtttttacactgtttgtgggaatgtaaattagttcattcactgtggaaggcagtgtgaaaattcctcaaagatctagaaccagaaatgccatttgccccagcaatccctttactggatatatgcccaaaggaatataaatcattctattataaagatacatgcacagggctgggtgcagtggctcacacctgtaatcccagcactttgggaggccaaggcgggtggatcacctgaggacaggagtttgagaccagcctagccaacatggggaaactccatctctactaaaaatacaaaaattagccaggtatagtggtgcacacctgtaataccagctactttggaggctgaggcaggagaatcgctggaacccaggaggcagaggtcaaagtgagccaagatcataccattgcactccagcctgggcaacaagagcaaaactccatcttaaaaaaatatatatatatacatatacatacatatatatacacatatatatacatatatacagatattatatatgtaaatgtatatatatgtgtatatatatacacatatatatacatattataactacatatatatacacacacacatacatatacatgcacacatatgtttattgcagcactatttacgatagaaaatacatggaatcctcccaaatgcccatcaatgatatattggataaagaaaatgtgatatatattcaccatggaatactatgcagccgttaaaataaatgagatcatgttctttgcagggacatggatgaagctggaagccatcaccctcagcaaactaacacaggaaaagaaaaccaaacaccacatgttctcagtcgtaagagggagttgaacaatgagagcaaacacatggatacatggaggggaacaacacacaccagggcctctcagcgggacaggggtaggagaccatcaggacaaacacgtggatacatggaggggaacaacacacaccagggcctctcagggggacagggggtaggagaccatcaggacaaacacgtgggtacatggaggggaacaacacacaccagggcctctcagcgggacagggggtaggagaccatcaggacaaacacgtgggtacatggaggggaacaacacacaccagggcctctcagggggacagggggtaggagaccatcaggacaaacacgtgggtacatggaggggaacaacacacaccagggcctctcagggggacaggggtaggagaccatcaggacaaatagctaatgcatgcagggcctcatacctaggtgatgggttgatgggtgcagcaaaccaccatggcacacatttacctatgtatcaaacctatactttctgcacgtgtatcccagaacataaaataaaatttaaaaaatatatacactgattcatgatctcctttctctccttctgaaacactctttaaaactttttagcatttccccctctgtcttccatgtctcctaactacatgtttcttattttccatgtctttattcctgtgttcattttggatagccccttctgacctatattacagtttactagttcactcttcaactgcttctaacatactaatattctgttaaaaccattcatttgggtttaaatttcaattatgttattctctatggacattctatttgttttcttttaatcttcttggccattctctagagtttcctgttccattatgatatttttaattttttgttttactttaaacatactaaatatagttattttattttattttctgtatctgatactttcaataactgcagtctttgctagtcttttttctgtgctcttgctcatagtttttttcatttgttttcatgattagaaaaacagagagagaagaaggagagtaaagggaggaggcggaggaggagaaaagaagaaagcagagaagaagggacagagaaaaaaaggaagttggttctaacgtttctctaacaactggcttcagtgaaacactcccaccttgtggatttttaggttattgaaattaaccagtcttctgggtgcagcacaccaacatggcacatgtatacatatgtaacaaacctgcactttgtgcacatgtaccctaaaacttaaagtataataaaaaataaaataaaaagctacacaaatttaaaaaaaaagaaatcaacctaattcctagattaccacctcttgattcaaatgctttaaatctaggcttttcatctgagtctttctttttagttattctgtttatcttcaaaacactcctgctttgaatcattcaaaatctacctccctccctctgtttgactaccatcaatttttttgctcattcctaatgcattaatctattagctgtgaatatccaaaaaccctcatttcactgaatctttgacagacccctttgcatcctcttgttcttctaattatttcctcagaaactttatgttctcttttctttacaagcatgtcatagtttatatataatgtgtgtattgtttttatatatacctatatatagcctctttttaaaagcactatacaccatgctttgaaatatattctaaaatcaggtagcatgaaaatggaaacataacatactaaaacatatgggatgcaacaaaagcagttataagagggacatttatagcaataaatgcctacatcaaaaaagaaaaaaaagatctcaaataagcaacctaatattatgcctaaaggagcgagaaaattagagaacaatacaagcccaaagatagcagaaggaaacaaataacaaagatcagagcagaaataatataatagaaactgaaaatttcaataaaaataagaattgttttttgaaaagataaacaaaattaacaaattcttacatagactaagaaaaaagaaaacaaactcagaagtgaaagaagagacattacaactgataccacagaagttaaaaaatcataacatactactataaacaattattcaccagcaaattagataacctagaagaaattgataaactcgtaccaaaactgaatcatgaagaattcaaaatttagaagaaatcatgaataaggaaattaaatcaccaatgaaaggtctctcataaaagaaagaccaaggattgaatggcttggtggctgaattccaacaaacacttagatgactaacaccaatccttcccaaactcttccaaaaaaaatgaagaagaggaatactttcaaattcatttttcaaaaccagcattaccctgataccaaaaccagagaaggacactataataaaaataaattgcagaccaatactcctgatgaacttggatggaaaaaccttcagccaaatattagcaaatattatttttaaaaaaaaacagcaaaaaaattcaccagcttaagtgggattcatccctgggaagcttattagtcttatttgattcgtgtaatcagaaaatttctatgtctagtgaagagaaatgagagcaatagagactcatagcacctcaacaaatgtccaggcttgagccagttaacaaatacaagtccttcaaatacaaaaaagactgtgaaagaaaatagaacagatcaatgagactaagaatttgttctttgaaaagataaaactgacaaaccattagctagactagaaaaatgagagaatactcaaagcaataaaatcagaaatgaaagaggaaatattgcaactaataccacagaaatacagaggatcataagaggccactataaacaattacaagccaacaaattggataacctagaaaaagcagataaatttctagaaaaatgcaacttacctagagaaagtcaagaagaaagataaaatctgaacagaacaatactgagtatggagagtatatcaataataaaacatctcccatcaaagaacatcccaggaccagaaaacttcattgctgaattctaacattttaaaaaataataatacaatccttctgaaattcttccaaaaacttgaaggagaaagagtatttccaaactcattttaaaagatcagcattattgtttttttttaaagtgatgttccccttcctgtgtccatgtgttctcattgtccaattcccacctatgagtgagaacatgcggtgtttggttttttgtccttgtgattgtttgctgagaatgatggtttccagcttcacccatgtccctacaaaggacatgaactcatcattttttatggctgcatagtattccatggtgtatatgtgccacattttcttaatccagtctatcattgttggacatttggattggttccaagtctttgctattgtgaatagtgccacagtaaacatacgtgtgcatgtgtctttatagcagcatgatttatagtcctttgggtatatacccagtaatgggatggctgggtcaaatggtatttctagttctagatccctgcggaatcgccacactgtcttccacaatggttgaactagtttacagtcccaccaacagtgtaaaaatgttcctatttctccacatcctctccagcacctgttgtttcctgactttttaatgatggccattctaactggtgtaagatggtatctcattgtggttttgatttgcatttctctgatggccagtgatagtgagcattttttcatgtgttttttggctgcataaatgtcttcttttgagaagtgtctgttcatatcctttgcccactttttgatggggttgtttgtttttttcttgtaaatttgtttgggttcattgtagattccggatattagcactggggcctgttgtggggtggggggaggggggagggatagcattaggagatatacctaatgttaaatgatgagttaatgggtgcagcacaccagtatggcacatgtatacatatgtaactaacctgtacgttgtgcacatgtatcctaaaacttaaagtataatttaaaaaataaataaataaaaataaaaataaaaaggcaaacaaggacactataagaaaagtatgggccaaccaatatccctgatgaacacagatacaaaagtcctcaaaaaaaagtactagcaagcagaatttaacaacatattaggagaacatttaccatgataaagtggatttatcctccagatgtttcagcaaacacaaatcaaatgtgataaaccacattaacagaatgaaggataaaaaaatagctatctctatatatgcagaaaaagcatttgactaaattcaaaatcctctcatgactaaacctctcaacaaattgggcatagaaggcatgtaccttaacacaaaacaggacatatataacaagctcacagctcacatcatacccaacaatgaaaaagtgaaatcttttctgctaagatcaaaaacaagacaaggatatttattctcactacttctattcaacttatttctggaagtcctagccagagcaattaagccaaataaagaaataaaagattcaaattgaaaaggaagaagtaaaattgtctctgtttgatgacatattatatataggaaaccctaaaaactccaccaaaaagctattagaaatgataaatgaattcaataaaatttcagaattcaaaatcaatgtacaaaactcagtagtttctttacactcacaacaaactatatgacaaaaataaagaaatcaatctcattcacagtagcatcaaaaaaaacgtattttttttgtttaggagcacatttaggattgtacttaggagtacatttaaccaaggaggtgaaagatctgtattctgaacactataaaacattgatgaaaaattgtagatgacacaaatacatggaaagatattttatgttcatgggtaggaagaattaatattcttaaaatgtccttactgcccaaagcgatttataggtttaatgcaatatttatcaaaatttcaatgtcattcttcacagaaatagaaaaaacaatttgaaaatttatatggaaccacaaaggatcctgaataactaaaggactcttgagcaataagaacaaagctgaaggcctcacaatctgacttcaaaacatattacaggaaaagaacaaaagaaggaagaagagggtagaggagaagtgcagcaagggtggagggaggtgcccacgctgggtcggaggagcaggaggagtatggagggaagactcctgggtggcatggagctcttgcacctctaggcactgcccagccctgtgtcagccagggctgaacccccacaggataaggaagcctgtgtgtgtaccaacaatcaaagctacatctgtgacacaacaggacactgctatgggcagtctcagtgttgtaactactactatgaacattggtggttctggctggcgtggaccatcaccatcatcctgagctgctgctgtgtctgccaccacagccaagccagccctcaagtccagcagtagcaacatgaaatcaacctgactgcctatccagaagcccgcaattactcagtgctaccattttatttcaccaaactatttattaccttcttatgaggaagtggtgaactaacctccacctgtttccctccctgtctgtccattgtggatgagctctgagccctgttttcctgtgaagattctttgaattgcagccattctattcacatgaactctcacatctggagcacagatggccctctcaaggtaatttattgtatgcattgactgtttaccaaacaaatgtcttactatgtactcaggtatattcagcagcattgtcgactgcagtcccctatgcttgccagaagatactgtattcaaagtagaagtttcacagtgatgagtaatcactgcaattttcccattgctccatggactctcggaggccggtgttctgttccctgtaaatagagatgtactctgaacctttctgcctccctcagctgttcctagtccttggtatcagcccctggagatgtccacaaccacttaggacaaaaggcaaaagtggaatttcagacaaaactttgataggatcttcagtgataaacttggactaactgtggcccaggtatcagcactcccaagaattgccaggaggaagctttggcagacaccacaggtatggcaaggcctatctccctctgctgaatccaacaggggcaagcaagctggcatgtggcttgaggtgacccgaatatgtcagcacccctcagatgtctttctttgcacttttgaaaaaaatctcagaatttgctggcaacatggccaaataggaacagctccagtctgcagctcccagtgagatcaatgcagaatgcaggtgatttctgcatttccaactgaggtacctggttcatctcactgggactggttggacagtgggtgcagcccacggagggtgagccaaagcagaatggggcattgcctcacccaggaagtgcaaggggttgggggaattccctcccctagccaagggaagccccgagggactgtaccatgaggaacggtgcactccacccagaaactatgcttttctcatggtcttcacaatccacagaccaggagattccctccagtgcctctgccaccaaggccctaggtttcaagcacaaaactaggcagctgtttgggcagacaccgagctagctgcaggaggttttttttttttcatgccacagtggcaactggaatgccaacaagacagaaccattctctctcctggaaagggggctgaagccagggagccaagtggtctggctcggcaggtcccacccctacagagcccagcaagctaagatccactggcttgaaattcttgcacagcagtctgaggttgacctaggacactagagcttggtggggggaggggcttccacattgccaaggcttgagtaggcagttttacccccactgtgtaaacaaagccaccagaaagtttgaactgggtggagcccaccacaactcagcaaggccacagcagccagactgcctctctagatttctcctctctgggcaaggcatctctgaaaaaagggcagcagccccagtcagagacctatagataaaacccccatctccctggaacagagcacctaggggaaagggcggctgtgggcacagcttcagcagacttaaagcatctttgaaaagcctgatggctctgaagagagcagcagatctccctgcacagtattcgagctctgataagggtcagactgcctcctcaagtgggtccctgacccccgtgtatcctgactgggagacacctcccagtaggtgccaacaggcacctcatacaggagagctctggctggcatctggtgggtgcccctctgggacaaaacttccagaggaagaaacaggcagcaatcttggctgttctccagcctctgctggtgatacccaggcaaacagggtctagagtagacctagggcaaaccccaacagacctgcagcagaggggcctgactgttagaaggaaaactaacaaacaaaaaggaatagcatcaacatcaacaaaaaggacagccactcagtgaccccatcagaaggtcaccaacatcagaaaccacaggtagataaatccatgaagatggagagaaaccagagcaaaaaggctgaaaattccaaaaaccagaacgcctcttctcctccaaaggatcacaactcctcaccagcaagggaacaaaagaaaactggacagagaatgagtttgacgaattgagagaagtaggtttcagaaggtaggtaataacaaactcctccaagctaaaggagcatgtcctaacccaatgtaaggaagctaaggacctggaaaaaaggctagaccacttgctaactagaataaccagtttagagaagaacataaatgacctgatggagctgaaaaacacgccatgagaacttcatgcagcatgcacaaggatcaagcactgattcggtcaagcggaagaaagatatcagagactgaatatcaacttaatgaaataaatcaagaagacaagattagagaaaaaagaatgaaaagaaatgaacaaagcctccaagaaatatgggactatgtgaaacgaccaaatctacgtttgattgctgtacctgaaagtgatggggagaatggaaccaagttagaaaacactcttcgggatattatccaggagaacttccctaacctagcaaggcaggccaatattcaaattcagaaatatggagaacatcacaaagacactcctcaagaaaagcaaccccaagacacatagtcatcagattgagcaaggttgaaatgaaggaaaaaatgttaagggcagccagagagaaaggtcaggttacccacaaagggaagcccatcagactaacagcagatctatcagcagaaactctacaagccagaagagaatgggggccaatattcaacattcttaaagaaaagaattttccacccaggatttcatatccagccaaactaagcttcataagtgaaggagaaataaaatcctttacagacaagcaaatgctgagagattttgtcaccaccaggcctgccttaaaggagctcctgaaggaagcactaaacatggaaaggaacaactggtatcagccactgcaaaaacataccaaattgtaaagaccgttgacactatgaagaaactgcattaactaacagcaaaataaccagctagcatcgtaatgacaggatcaaattcacacataacaatatcaaccttaaatgtaaatgggctaaatgctccaattaaaaaacacagactggcaaattggctaaagagtcaagacccatcagtgttctgtattcaggagacccatctcacgtgcaaagacacaaataggctcaaaataaagggatggaggaatacttaccaagcaaatggaaggcaaaaaaaagcaggggttgcaatcctagtctctgataaaacagactttaaaccaacaaagatcaaaagagacaaataagggcattgcataatggtaaaaggatcaatgcaacaagaagagctaattatcctaaatatatatgcacccaacacaggagcacccagatgcataaagtaagctcttagagacttaaaaagagacttagaccctcacacaataatagtgggagactttaacaccccactgtcaatactagacagatcaacgaaacagaaagttaacaaggatatccaggacttgaactcagctctggaccaagtggatccaataggcagctacagaactctccaccccaaatcaacggaatatacattcttctcagcaccacattgcacttattctaaaattgaccacatatttggaagtaaaacactcctcagcaaatgcaaaaaaaaatgggaatcataacagtctctcagatcgcagtgcaattaaattagaactcaggattaagaaactgactcaaacccacacaactacatgtaaactgaacaacctgctcctgaacaactactgggtaaataaagatattaaggcagaaataaataagttatttgaaaccaatgagaacaaagacataacataccagaatctctggtacacaattatagcagtgtgtagagggaaatttatagcactaaatgcccacaagagaaagcaggaaagatctaaaattgacaccctaacatctcaattaaaagaactcaagaggcaggagcatacaaaaagctagcagaggacaataaataactaagatcagagcagaactgaaggagatagagacacaaaaaaaccttcaaaaaaaaatcaatgaatccaggagctggttttttgaaaatatcaataaaatagatagaccactagccagactcataaagaagaaaacagagaagaatcaaacagatgcaataaaaaatgataaaggagataccaccactgatcccacagaaatacaaactactatcagagaatactataaacacctctacacaaactagaaaatctagaagaaatggacaaattcctggacacatacgccctcccaagactaaaccaggaagaagttgaatccctgaatagaccaataacaaggtctgaaattgtggcagtaattaatagcctaccaaccaaaaaacagtccaggaccagatggattcacagccgaattctaccagaggtacaaagaggagttggtaccattccttctgaaactattccaaacaacagaaaaagagagaatcctccctaactcattttatgaggccagaataattctggtaccaaaatttggcagagacacacacaaaaaaaagaaaatttcaagccaatatccctgatgaacatcgatgcaaaaatcctcaataaaatactggcaaaccaaatccagcagcacatcaaaagcttgtccaccacaatcaagtcggcttcatccctgggatacaaggctagttcaacatacgcaaatcaataaacataattcatcatataaatagaaccaatggcaaaaaccacatgcttctctcaatagatgcagaaaaggccttcgacaaaattcagcagcccttcatgctaaaaactctcaataaactaggtactgatggaacatatctcaaaataataatacctatttatgaaaaacccacagccaatactgaatggtgaaaaactggaagcattccctttgaaaaccagcacaagacaaggatgccctatctcaccactcctattcaacgtagtattggaagttctggccagggcaatcaggcaagagaaagaaattgtctctgtttgcagatgacatgattgtgtatttagaaaaccccatggtctcagcccaaaatcttcttaagctaataagcaacttcagaaaagtctcaggatacaaaatcaatgtgcaaaaatcaagcattcctatatgcaaaaaacagacaaacagagagccaaatcatgagtgaactctcccattcacaattgctactatgagaataaaatacctaggaatccaacttacaagggatgtgaaggacctcttcaaggagaactacaaaccactgctcaaggaaataagagaggacacaaacaaatggaaaaacattccatgctcatggataggaagaatcaatatcatgaaaatggacatactgcccaaagtttttatagactcaatgctatccccatcaagctaccactgactttgttcacagaattggaaaaaactactttaaatttcatatggaaccaaaaatgagcccgcagagctaggacagtcctaagcaagtagaacaaatctggaggcatcacgctgtctgacttcaaactatactacaagccttcagtaaccaaaacagcatggtactggtaccaaaacagatatgtagaccaatggaacagaacagaggcctcagaaataacgccacacatctacaactatctgatctttgacaaacctgacaaaaacaagcaatggggaaacgattccctttttaataaatggtgttgggaaaactggctagccatatgcagaaaactgaaactggatcccttccttacaccttacacaaaaattagctcacgatgtattaaagacttaaacataagatctaaaaccataaaaaaccctagaagaaaacctaggcaataccattcagtacataggcatggacaaaaacttcatgactaaaacaccaaaagcaattgcaacaaaaaccaaaatagacaaatgggatctaattaaactaaagagcttctgcacagcaaaagaaactgtcatcagagtgaacaggcaacctacagaatgggtgaaaatttttgcaatctatccatctgacaaagggctaatatccagaatctacaaagaacttaaacaatttacaagaaaataacaaacaaacccatcagtgggtgaaggatatgaactgacatttctctaaagaagacatttatgcagccaacaaacatatgaaaaaaagctcatcatcactggtcatcagagaaatgcatatcaataccacaatgagataccatctcacgccagatagaatggcgatcattaaaaagtcaggaaacaacagatgctggaaaggatgtggagaaataagaatgcttttacactgttggtgggagtgtaaattagttcaaccattgtggaagacagtgtggtgattcctcaaggttctagaactagaaatatgatttgacccagcaatcgcattactgggtatatatccaaaggattataaatcattctaccataaagacacatgcatacatatgtttattgtggcactgttcacaatagcaaagacttggaaccaaccaaaatgcccattcaatgatagactgcataaagaaaatgtggcacatatacaccatggaatactatgcagccataaagaaggatgagttcatatccttttcagggacatggatgaagctggaaaccatcattctcagcaaactaatccaagaacagaaaaccaaacacccgatgttctcactcataaatgggagttgaacaatgagaacacatggacagagggaggggaacacaacacaccggggcctgtctgggggtaggggctaggggaaggttagcattgggttaaatacctaatgtagatgatgggttgatgggtgcagcaaaccaccatggcacgtgtatacctatgtaacaatcctgcatgttctgcacatgtaccccagaacttaaaatataatttaaaaaaaaatctcaaacaactcactgaagtgtctcaaagctgaacaagttttaccaaaatgaatccttctcagttaactgatcaaatggatgaatcctgaccctctgaagtctctttcctgagttagagcagggaactgctctgagtgttaactgttggattcactgcagtgtcctacaatattttacaagaagatgaaaaggcaacctgcagacctaggcttgattcccaagtcacagtctgacccctgctacaggaggttaccctcctcaggaagagatagaaatagggaatttgaaggaatagtgaggggaccagggagatttgattgagtctggtttccaggtgaattaaaaggaagggtgtcatccagggtttgttgctacagtcaaaagaataaataaatcaatgaagaaataccttcattgtctgtggttttcatgcagatatactcatggaggttgtatctctccaaaaacagacaaatccaaggctgtgaacaagcatccgcatttgaattccattaaaccaaaatctatgttgaacgaagtgaagtctgtacacagcattgcaaatgtgaacacattcctgtgtgaggcacatcaacatttgtcagttattgtgaatatgtgtatttttaagcaataagatgcagctggtcagttttctgggcaatcttggcgatgcatttcctgtgctgtggttgttctctaaccactgtgagaaacccaaataaaaatcgatccccccccaaaacaaatacgtatcacaaaaccatagtaatcaaaacaacatgacacttgcacaaaaacagacacattgaccaggggaacagaataaggagcccagaaataaactcatgcatttatgaccaataaatttttgacaaaggtgcccagaaaacgtaatgaagaatagacatttgtttcaataaatggtgttaagaaaactagatatccacatgcagaagaacacgaatgtgtatggtgtgtatccttatctcacaccatacacaaaaatcaattcaaaatggattaaaggtttaaacataaaactgtaaaactactagatgaaaacataggggaaaagttccacaatgttggtttggtcaaagatttcttggatataacccccaaagcacaggcaacaaaagcaaaaatatatgggattgcatcaaactaaaaagcttctgcacagcaaaggaaacaatatggtgaagagacaacctacaagttgtgagaaaatatttgcagagcatacatctgatgaaaggctaatctccaaatatataagggactcaactcaatatcaagaaaacaaataaccaagtcaaaaaatgggcaaggtcctaaatagacatttctcaaaaaaaatacaaatgactaacataaaaaaagtttgtcatcctaattatcagggaaatgcaaattaaaatgacagtgagatgccacttcatacctgttagaatggctactatcaaaatgataaaagataacaagtgttgaagaggatacagagaaaagggaaccctcgtacactgttggtggaaatgtaaattaatactattatgaaaaatagataaaagttactcaaaaaactaaaactagaattactatatgatccagcaatcccacttccttgtatatatccaaaggaatttaagtcaatatgctgaagagatatctccaggctcatgttcattgcagcattattcacaatacccaaatatgaaatcaacacaggtgtctatcaactgacaaatggatgaagaaaatgtagtgtatatatacaatggaatactactcagccttaataggaaggaaaacctgatatatgtgacaacatgaattaacccagaagatatcacgctaagtgaaataagccaggcacgaaaagacaaatatcacatgatctcactgatatgtggaatctgaaaaagttgaattcatagaagtagagaatggaatggtgattatcagaggctaggagttgggggtagacatggaaaaggtagatgttgataaaagggttcaaagtttcagttagacaaagtttcagtgaactattgcacagaatggtgactgtaataaataacaaggtattgtatgtttcaaaatgactaacagagtagattttaaatgttttcaccacaaaaaagatatgtatgtcaataagatagacctaatctttccacaatttaaacatgtatcaaaacattacattgtaccccatagatacaattattatttgtcaatttaaaatttttcactaatttatattgttattgttgcaccaactcctttccaccaggcagattctcataaagactattttctctcttacatgaagcatttcctacacacctcttaatcacggtagcattgacatcattccaccagattctatctccagtgttaaaataatcaagaacccagaaatctccaccagggggcaaccaatgcgtatcaaagtttcccactttcctttagatttacttatgggtaacttatgggaaaaaatacttaagtacttccctttttaaagaaaaaaattatatgaattctacaaaattatggcagaaaatttaagaagagcagatgcttcccaactcattctaaagggccagcattaccctgattctgaaatgaaaaagctttacaaaatccaagatccattcctgactaaagataaaagaaattttcagcaaactgtgaatacagaaaactttctcagcctgttaaagagtacctatgaaaaaaattatagctaacattatacttaatgatgaaatatttaatatatttcataacaggaacaagtcaaagatgtctgctctaactaattctactcagcattcaacaaaatgaatatagtgaattcatactagaattttaaaagcaaatgtctttattcactgacaacataatcatctataaagaaaatcctacataacctataaaaaactgatggaactaataagttttgcaagtttacaggatataatgtcaaacaaagatctattatgtgcccataagctaagaataaacaattgtaaattgaaataaaaatgtcacttaaaagggcatcagaaatataaaacttagagataaatataaagtacatatgcataaagtacctgttcaccaaaaactacaaaacattgctgaaagaaattaaatgggcataatatagatgtagagatgtgttgaatttatgactcattttgaacaaggaatatattcatcatatattcatcagataagaattatgttacaggtctaataacattcaaatcaatacataatgtctcatagttcctgaatctaaaatatcaaagaaagaaacataaagccatatcatgtttaacgagaagggcttattgtatcatttatgagatcttcttgtaaatcactagctgtttgcatactctctttattgctgccttcatctccttattcctgaatgtatagacaactggattcagaaaaggagtgagaactgcatcaaaaatagccagaaacttgtccatctgtgaattagggtgtggccatgtatacacaaacatgggtggaccaaagaacaaaaggaccgctgtgctgtgagctgaaagagtggaaagggccttggatgaaccacctgaggaatgtttccaaacagtaaacaggatgaagacgtaggagattagaagtatgaagaaagtacccacacagataaacccactgttaacagtgaccatgaactgcaatctgtaggtgtcggtacaggctagtctgagaagctgaggaaggtcacagtagaagctgtccaacacattagggccacagaagggtaaattaacaagaaatgccagttggaacagggagtgactgacaacaagggtccaggcaacagccagaaatgaaaggcacattcttgggctcataatggtcagatagtggaggggcttaatagggccacataactgtcaaaggccatggctatgagcagcaccatctccacaccaccaatgacgtggatgaagaagatttgagcgatgcagcctccaaaggagatgactttgcgctttctgaacaggtcataaatcatcttgggagaagtgacagagcaggctcctaagtcaatgaaggagagactgaccagtagaaagtacatgggggagtgtaagtgagggtcagtggtcacagaaaacacaatgaggatgtttccagtaatgcttgccacatagagcacagaggaaaacactaggaggaggagctggatctcccatgaatgagtgagtcccagaaacaaaaactcagataccactgagtgattctctccatccattggtccagccaactgggctgtggctaaaattatgagaactaagaaaatggggaggaaattgtgattatgaagataatatgtactaaaatcaatattgcaatgtcactatgaataaatagtatacagttattctgttcctcacatattaaaaacaaaaaatcaacataatattatcacaacatgtgagctgcaacctgatttaaacccatcatcaatactttcagtgtaatgtctgatctaaaattaacagattaggtaagaacaagattcctgactatccatgaaattcatcaggtgtttaaatgacctgcgatattaactattcctcatttccaacatattccatttgtacttatacatattcttataatttccttcccttcccagtttgcagccacaattctctgacagaaagtagacataagaggaaaacatgattaacagatggattatcacctgcagtaagaggtgcctgggacggacttagttgaggtaggctgtggattgagacagaatatagagactggggtatgtgaaatcggaaagcccacaactgtagcagaacagagtaagtggactttcacaagaaatagaatcaccaccattatctaccacattttctcctgctcactgctatttaagtgcctcagtttctatacaatctttcacaattacgaagccctaaatggcttcccatcctgcagtgatttcataaggagcctatgccacctgtcatgtaaggctttttccatgcctaataaatatgttttggagggatttcaccagagtttttgctaagatgcataaaatggccacagaggttgtgagaaatctctgcagtttctctttgtctatacacatgaaagtattgaagaccagcacttggattagttaagataatgttttaattcatcactgtctcctcctccccttggtaccagcttttatgttcattgcattccccacccttttaagtactcagtacctcctgcatggtaacctattctgatatttgatattatcatgcttaatttgactgaatccatttggatattttatctttaagaaatttgtagttttatacttttaatttatgataaaattagattaatatcaaacattaacaagtgacttttaggaaggtatatgagctttcttattgacttcaaactataaagtacaaactgtgacactagaaatttagtcctttaacacatgttgtatttatatgtgaagtggagggtgagcagaaaacagtgttatatttctctgtgtccagatggatactcacctcaatcattttcctatagtagaaagtagttcctgaaaacacttaatagagattattttagaagttgctgaggtacaaataaaactgctatgctgacatacttttttgcaccaacaactccagttcttctgacacaaaggaccatcttcctagtgccataatttatcttagaccccaaaactcacagaggcacacatcatatctctaatacttgctcaccaccactggcatgagtctctctctatcctcttctacgtgaagtgattatactgtcacctctggagctaactgtccacagtctcaagatgcacacttttacaaccagaagcctatggactgggtgagggagcagaaacagccacaggtactgcccatcagggtaatgtaagtcagcgtgcaaacaactgatcagatgaacatgaatagcaaggtgccgaggcactgggaagagggaccggaaaactctataactgttgaaaaagactcaagcccttgggaagggaaatgcctacgaaattatataaagaccattttatccaagttggtcatcattcagatgaaaaccatgaggcccagaaaagtaaactgagtttccagaattcacacaattgatagaataggaaccagaattcaggcctcttgcttcctattccagaaagacaaattgcaataataatcaaataatatgagcaatcatccagtaaaaataatctagtaaaaacagcaaaactcaaaagagtgatttttcctggttaagaccaaactaaccatagattgctatacatagtatctattataaatactgaattatatagcagcctgacaataaatacataaaatgtgtacacaaagattattgaacctgtacaatacagtagtaaatagtaactttatatttgcaaagtgactgatcattactatcagaatttgtacccattcttcatattttgttggtcatataaccagttactacaactgcaaaaacaacctaaggtcatgtttctgtgaagtccatccttttggtctttaaattttattattctcaaaggtcaattatgatctcaatcttttcttgtaattttactgacaattctccttcacactgatttgttctttctctaattcctgtaaatagaaagaaccaaaaaaagttgaaaaaacatgtattgtacatataacaaacaatcatatgtggtatacaatatatatcaaatgagtattaagataaacattcaaagagttttaaagaaaaaagtgttatagatattggagggcagaagagacgattgccattaagaacaggtggaggaggttatgccaaggacattgacctgaccctttaggaattagtgaaaattgaataggagaagaatgaggtatacaatgtgtgaaaaatacctaaattgatataacaggaggagaccttttcatatcaattatcattacttctgtgtatataaccatattagatacccacaaacgaatagaaagtggatagttcttgattgacaagtaagactaataatcccagatcatagtaaggtcttaacttcaagtcaataatctttattacttatggttcattcctctccctcatgttttccaataattttaaaatgcataattaaaacaattctcatttaaaaacatagtagccatgactaatgatcttccagtgggaaggtactaagactttacaacatgtttcttgctggggataagacagcctacagccagcattcaactcatttttctaaagtctatggatcaatttgaaatacagaaaaagtagaacagagataaagttaaaaaaagattaaaaatatgggaagaatgggagaaaggggagattagaagatatgaacaatgatttaaaaataaaagagcctcaaaggagaagagaaactgctaagcaagactaaggtaggatgaaatacagtagtctctgtttctgagaacacaggttaaaaagaacataaataaaataaatttatcacctttaatacactcattcaaggatgctactgagtttgactttgggaatttctcacctttaatacactcatctggggatgctacggactgtgacattgggttgcatttaacgggggagagaaagggcagttgcttctattatctgcccttttggactcacagagtttctttgaaaagcacagatgataataaatggaaatattgccttttatactatacaataatatacacatgcaattcactggaaaaagtatacttgttactatgatttgaggatactaccatatactaatcaagagaaacacatgtacagaacaaagaagccacatgaaatttttactagtgtgtgttttccttgtgttctaccaccccaggagcagcttctgctactgaagatcacagtagagttatttccaaaagttgtgggtctgcagggtggacttatcacatagctgtttgccaaaattcaaaagtccagaaaccatttccaaattttcacctcttttatcttcaaatcctaaaactatgaaaattcacaaacttagctccatacattatggtagaaaggttaataatttggactttgagtttgaccaggcctgatttttgaataaattcacaaacttacctccatacattatggtagaaaggtcaataatctggactttgaggtcgaccaggcctgatttttggatccaggctgcaacactcacttgctgtgttaacgtaacaaagttcctagaccatgctgagcttcagtttacttgttattgaattagggatatagcgttcaaaggaagaagttctagtatttgattgcacagcagagaaattatagttattgaactggggatatgtagatagacataataaattttagtattcaattatacaatggagaaatcatagggaacaataatttattatatattctaaaatagctagcagagaaaaattataatgttcccaacacaaagaaaagataaatattcgaggtgatgaatatccaaattactctgatttgatcattacacattgtatacatgtatcaaaaatatcacatgtaccccaaaacatgtacaactatgatacatcaataaaaaacaacaaaaaaaccaaaagaatagaaatcaaaaataaatacataaatacataaaatagggataataatacctcccttgcttgcttgctcccttgctccatttgtaagaaataagtgatataatataggtaaaaatacttaacctcatacctaccacacagtatagcacaataaacgttatttattataatctgaggcctacctacataagtgactttcaagtatagaaaattatttctcaaattttaaatactccctgattctcaggtatggtaattagacctggctttaggtaaagctctcatgtctacacttggatttaatcacttaagtatatttcccagtgccccccccaaaaaaaattgctcctaggtggacacactaatcaaagacttcctgagaaatgcaggaagaagttttgtcctctgaccacgctacaccctttccttgatggtaagccccataatctaaagccataagtttcaattcctcacataaaaagaaaaaaaatgtcttttatgaccacttcagataacactggatatttcccttgtcattaggaatgagaaatgggaggaaggtaaacttgtagacaggagaattggtagatgcttgaaaggatttctgaaaactgtgcctatccaggtgtacaaatgtgttgaccagccaaggcaaagcagtcaaaccatacaataccttatcctcaggaaaatggacttttctcccaaattgcctttttcatgaaaaatataaaattctccagtttcaacctcatgttaaatttcacatgtgaagaaaacagtcatgcacatcagaaaattaaatggcgagtcaagaccaaattcctagtcacagttatgttctgtttccagtattaccttctcacttattcattttgttaaagtggagccaaaatagaagtgggtgtcacacatcaagaaagactgaagtcgtacaaagccgatccttatccaacgtgcattaaaatatgcatcaggcatgtgtgatgcatatagtagaagtggaacaaatcaggccaggtgcagtggctcacgcctgtcagcccagcactttgggaggccaaagcaagcaaatcgcttgagatcagcagttcaagaagtgtaacaaatcctctacaatataagtagagtgaaaagagatagctacagtgatgagggaaggcactatagtgatgtggcatttgagtatagccataaaagaggataaatattacaatacatgaatatagggtctaaagaagtcttttcaagtagattgtaaaatatttcaaaaatggtaagtttggtgtatgttgaagcatacagattgtctacatcctaaaaatcattttggtgaataaaggaaaataagaaaggtagtcaatattcatttgttgcctatcattagaaacttctcaaaggtatatgagaattattaaataaatttaggaagccagtgaaggtatgggtcccgggaattgaggatgaagccagtaattagggaagatgccctatctataagtgtgatgtatcaaatggaggaaaagaaaaacggagggaaggagttcccttaagagaagattgaaatagagcagacttggggggctacacagaggaactggg[367 bp omitted]ctggtaagtaaaaacccaaaggattggtgacttatcacagctggagtgaatacgaaggagcatgaactcaaagaaaatatcaagatttaagcaagaataaataggacaatggtaggtccatttttagaaattagaaagttgaacataaaatatgtcagggtggagaaaataatcacgtgtattttaagcaaataagagtattagatattgagatgctcaggtgaaaacatatgacaggatatatgggggaaaagtacaaattcaacatgtaattgtatagtaatccatataaaaataatagacggatgtgtaagagtgcataaggtccctgaaggaaataatacacaggaaaaaaagattaaaaagcaaagacccaactatagaaactatccacattgattatgtaaagtaggaaaaggaatcaataaactagacagaacatcacagaggtaggaggacaagtgctggcctcaaggagccaacacagaagcaggtatcaagaataaaggaggagaagagagaacaaagagagagagaagagaacttctgtggcagaagatcaagtgggatggtagaataaaggagaagaaatacaagaaaattgaaataaaatttacagaaatgttctacattgtaagtgggcagttttgacctggcacattgttggcacacattataaatgtcaaatgtattaatgaatgaatgaatggataatataatgaatgtgatggagttgtcaaaagctgaattaattaaaagtccccacgagaggttagatgacaaaattttcagaaactttccatgccactctgttgtgacatcaacagtgctggacccttgaaatcaaaccaaaaggattccaccatgagaatgaaaagggctgagaaggggaatgctgggtgacacagaaggtgacaaagggcgaaaggtttctaggcatttgatagactgatggacgtccgcgctgaccataaggcacaggccacacaggaaggaaaatgagacccaacgcgaagaaaagtagggctaaacagtcgggaaaatgtgggaagaaggatgaatagtcatacgatcaactcagattcctccctgacattcttctacagctttattctcgtcctttgggagccgagatgttcattttcctacattcttagctgcctacacacggcgacttttctccacggtgcctgatccctgctgcatcctccttctctagtggcaacagcaaatggccacacagaaggcagacattgcacccaactgaggagaatgtaattcactcattgccagtcacagaccttggctcaccgatttactaagtatagattttatttctatccctcacctacctgttttgccaagggaactaagaaaagagcatcatcaaaaattcagataggtatagttctcacaagatgaaccagatccagtacggcatcactgcagacatacacacagagctgcataaaacaggaagagagctgctaatcacagccccagagggtagtggccaaagtgatgccttggagatccgagaatgccagactgagatcacacggcctggggaattaccgcctatggtcattttggttttcccgggatagccatgttaattgggtgaaataaagcatatttgattttcttatgacaaaaaagggcttttgccattgtctacagatgatactttaaatctttattttatgactaaaggtgaattccagagcaacattaaatgttgtccctttaaatttttaatcatttgcataacgattaccataatattcaatttaaacataaaatgtaattgaaagtatgagattaatatgtggacatgaaatcatataatgttccatggaaaaaatagaatgtataaggcaaagaggtttaaagtaacatcaaaactaacgctcactatacaaattctatgaaatcctcataattacactgtgaagcaggtgttgttagagccacataatctcaaacaaattatttattatctaaaattacatagatattaaaaggttaggccatatatgaatttaggattctctcaaaaattttttctctttctcctacatcaaacttccctaaattatagaaaagtcacaatgttaccaaacatattcacaaaacacatataatcttgaatccaaatttcagttacagcagaaaaaataaaactctagatcaatctcaatcgtgtaaataaattcagatttccaatctaagagtctcaatttgacatacttctttctctctcttctttcaaaccaggagaaatataaatatgagccacaaccttacaaaagctagaaaatatttacaattccacacaacaacacatgaagaaaaccttctggacatcaaaagtttaaaccagtcaagactgaacaccaagataaagtgcatgcctctgaagagcttgagctagtcaagaagcccagaaatccctaaaagaggtgtgtatactgaggactgaggatcaaaacctgtgatctttacttggaacagaaatattgcagcatgtgaaccctccacagagtgacagagggaaaggagtttaaagggaaacatgcaaatgtatcacctttggaataattaggacacgtgtgtggtgtaatgaaagaaggcaaaaagatggggaagaagccagacagatggcaattttcattctattatgaaaagaaaaggataagtcacaagtcacatgacgaaattaacaactatgaatccactctaagccatagtcaatcctatagcctaggagtcattctaacagatgagagtgttttggagacaagattccaaaactcgtctgccttccatcatacttactacccccagctcctcctccacaatatcctttcacaagtatctagaatattcaaagactaataatattatataattatttataataattgtattacaaaaataaaacttgatgacctttataaaaatactagaagaaaaagggaaaattacataaggtacagaacatacaaattataccatgaagcagtaaaaaacaggatcaaattttctatgttttttaaaaatatgccttctctaaaatgttttctctctgaaatgatatttagaagacataattgaaaataaatacaaaataaagtgataaaaaataatctggcaaaattcaggatgtaatgagtaaagacaaccatgaaagaaatgaagatcaataaaagcaggaaaaaaagtgggaagtggagagaataatgctgctaaaaacacagataagaatataaatgacaggcttaaatatatcctgagcaaaacgaaatagaaaacacaagaaggtgaaatgtaacattaaagtcaggtccaacaaatgagaaattagtgtgaaagagctcacaatatctggttaaaaaattcaaagataaaagaaaacttttctgaaatgaagaaaacattgaatctaatggttaaagggcttatctttatccagaaaaaatgtgttatagtatgaccacatcaaggcagatgcaactgaatttaccggacttcacaaacacaaaataaacaacccacaaaaaaaaaaaaaaaaaatagagtccccatgaggctttaatgaagacaactattagaggccaggcgcaggggctaacacctacagtcccaacactttgaaaggccaaggcaggagaatcacttgagcccaggagttcaagataagaccagcctgggcaacatagcaagaccccatctctatcagaaaaacttaaaaaagaaaactatccactaaaaatgaatagagataacatgatacaagtgagcattctgaagcctaatatcaaaatgttctggggtttgcggttaaagaacagaatgcaaatgttacaaaccataactgtataaagactaattatattcataacaaaaataagaagagaaagatagtagaaatatattctggtccattcaactttcacagtgggagagaatcaacaaattatgttatgggtgattaaatattattttaaaagataaaggtcattattagaaaaattaaaaataacaaaatcaaataaagttgaatgacgaaggtgggagaggaaagtgggtttaaggggtaaagtggaactatattaaaagagtcaatggagagcacccttggaaataacacaaaaattaaagaactaaatataatttatacagcacataactaaactataaatcttcaaattaaaagaaaataggtacatacaaaatatcacatagagagatattaataccatgaaaatattaaaataaaagcataaaattaattcatttatttaccctattagtattttttgaacacctatgtgccaggtattgtgctgaatgccagtaagatatagttcctgcatcttggagttttcgtggaggagacagagattaatcaaacaatcacacaaatgtaaaattgcaaccataaaaattactctgaaatacaatgaaaattactataagagagggatttgatgtgagtcagagaagtttcccctaagaaagcaacactgaagctgagatctaaagggtaaacagcagttaactgagtggagaacaaaggttttcctgcagggggaacaatctgctccccgaggccagagtggggccttgggagttgtgcctgaaaccacattgtgaggaagtgaggggaagcattgtgcagataatgctgaaataagtagtggaagatgcttcctaagagaatgagaaatccaagactactaagcagaagaatgatttgaccagatttcacatttgtaaatatcactatggttacaatgtatagaatggattttaaggaattcaaattggatacaggtgagtcaattacaaagcaacatgcttgccaaggcaagaaatttgattacttaaactagatatgggagttttggaaataagtagataaatttgtcatatatttgagataataaatcaccatgacttgatggtagacttagttggagatgccctcactagtgcaccatctaatgcttcaagtctaataattattcaattcctccagagccaccaatccaatggttctaccatatttatgctgtcattcactttactgatatccttcttaccttacctcttttcccactttatattccatgatcaataccttgctccctcgtaatgattgtactcactcttccaaacaacaatcctgataaatcctactctctgccttctacatcttgataccacacagctatatgtggctagataaaacaatcacactgacaatcatcctatgctttctgaatccatcactcttctactttttcagatcttttctttctccctcatccttaccatgtaatgaactcattttgcatgtcaagggctaaaagttgaatattttaaaagttctcattttcccactactatataaaccaacaaatatctttagtctgcattcacaaataacataacaaatgagctcttcatatttctatctgtggtgaattaagatgactagaaattttgtggcaccatcctgttgaaaacgtggggacatattctttctccttgaacctgggtgggctctttgactgctttgaccaataaaatacagtgaaagtaaaacttccagttttgatgtccagatgttaaaagccttgaagcttccatttctacatcttggaaccaacgtgtgtggggtgctgagtcggtatcgaagaattctgcttattctgcttgcattagtccattttcatgctgctgataaagacatatccaagaccgggtaatttatgaataaaaagagtttcatggaatcacagttccatgtggatggggaggcctcacaatcatggcagaaggtgaaaagtatgcattacatgggagcagacaagagacaatgagagctgagtgaaaggggaagccccttgtaaagtcatcagctctcatgagacttattcacgaccataagaacagtatgggggagccaccccatcattcaattatctctcaccaggtccctccacaacacatgggaattatgggagctacaattcaagatgagatttgggaaaggacacagccaaaccacctcattctgcctctggcacctcccaaatctcatgtcctcacatttcaaaaccaatcatgccttcccaatagtccccaaaagtcttaactcacttcagcattaactcaaaagttggcagtccaaagtctcacctgagacagggcaagtctcttccacatataaacctgtaaaatcaaaagcaatttagttattttctagataagataggagtacaggcattgggtaaatgcagccgttccaaatggtaaaatttacccaaaacaaagggactaaaggctccaagcaagtccgaaatccagtgggacagtcaaatcttaaagctccaaaatgatctcctttgactctatgtctcacatccaggtcatactcatgcaagtggtgggttcccatggtctcaggcagctccacccctgtggttttgcaggggagagccttcctcccggttgctttcacaggctggcattgtatgcagcttttccaggcacacagtgcaagctgtcagtggatctaccattccggggtctggaggacagcagccctcttctcatagctccactaggcagtaccctagtggggactctgtgttgggggcttcaaccccacatttccattccccactgccttagcagaggttctccatgaagacctcacccctgcagcaaacttctgtctggagatccaggcatttccatacattctctgaaatctaggtggaggttcccatacctcgattctggacttccgtgaatccacaggctcaacaccacatggaagctgccaaagcttgaggcttgcaccctctgaagccatggcctgagctgtaccttgaccccttttagctgtggctggagcagctgggacacagagcaccaagtccctaggctgtacacaggcaaacagcagaggggccctgggcccagcctatgaaaccattttttcctcctaggcctctgggtgtgtgatggaaggggctgccacaaagatctctgacatggcctgaagacttagcgattaacatttggctccttgttacttatgcaaatttctgcagccagcttgaatttctcctcagaaaatggatttttcttttctatcacagtgtcatgctacaaattttctgaacgtttatgctctgttttcctgttaaaactgagtgcttttaacacacccaagtcactcttgaatgctttgctgcttagaaatttcttctgccagataccctaactcatctccctcaagttcaaagttccacaaatctctagggcagggacaaaatgctgccagtctctctcgatagcaagagacacctttactgcagttcccagtgagttcctcatctccatctgagaccatctcagcctggatttcattgtctatatcattatttgacattttagtcaaagccattcaacaagtctctaggaagttccaaactttcccacattttcctgtcgttttctgagccctccaaactgtttcaacccctgcctgttacccagttccaaagtcgcttccacatttttgggttatctttacaacagcaccccactctaccagtaccaatgtactgtattagtctgttttcatgctgctgataaagacatacctgagactgagtgatttatgaagaaaaagacacttaatggactcacatttccaggtggatggggaggcctcacaatcatggtggaaggcaaaaggcacatctctacatgatggcagacaagacagaatgagagctgagtgaaaggggaacccccttacaaaatcatcagctcttgtgagacttattcaagaccacgagaacagtatgggggaaatactcctgtgattcagttatctcccgttggatccctcccacaagacacggaaattatgggagctacaattcaagatgagatttgggtggggacacagccaaaccatattgctgctgaatagatcatgtagacaggctctcaaactacacggagagcaagagaggcccaccttaccacaacatttcatccaatccactaataaaacaggcacatcactgaaaccaccttcaactctccagactacccagctgccagctgaataccacagatggctacagttaataccacatggagcagaatcatgtagctaagccctgcttgcactaatacaagtccacaattttttttaagtttgttgttttaagctgcgaagttttgaggtggtttgtggtacgtggaataagatgtcactctaatataatataaacttaaactatgtggcattggctttggaatcagacaatggatagaagccagaaggatttcacaaagactgttagtgaaaagtgaacagacttcaaggaaaatgatagcaaaacctgtaaaagcattctgggaactgacagtaaacactgaatggtccttaaggagactgaaaacttgaaagagcttaagaagtctactggaaagggctttaaggataatgagaaaaaatcatcagtggaggctgaggaaaacgcaccaaagtcgtattctgatgggagagttagaaaacgcttgcctggaatgatataaaatataggaaaaataccgaaaaagtttgtggatctggctggggagatttttggtgtcaactaaagaaaaaaattaagcttttaagaaattaaagttagatttatttaggggtctgagaacaagagactgaggattacagcctaggagaagtctttcagagaggttctgtcagactgctctggtgaaggtctttagcccacagtttatatgcaggctgtacatatacaccatggaatactatgccgccattaaaaaatgatatcatgtcttttgctggaatgtggatggaccttctattatacttagcaaactaatgcaggaacagaaaaccaaatacagcatactctcagttataagtgggagctaaatgatgagaactaatgaacacaaagaataaaacagaccctggggtctacttgagggtggagggtgagaaaaggaagagaagcagaaaagataactattgggtactaggtttaatacctgggtgatgaaataatctgtacaataaccccctgtgacaccagtttacctatgtaacaaatgcccctaaacttaaaataaaagttaaaaaaaaagaaaattaaaatctccttatcatctacctggtaatatgaaaaacacaaatctttcattcattcctttcaactgatgaggaaaatgaggcatcgggagttagtaaaagtccacattgagatatgagacccacgactggctggacgcagtggctcacacctgtaatcccagcactttgggaggccgatgctggtggaacacctaaggtcaggagttcgggaccaggctggccaacatggtgaaacccccatctctactaaaaatacaaaaattagctgggtgtggtggcaggcacctgtaataccagctactagggaggctgaggcaggagaatcgcttgaacccaggaggtggagtttacagtgagccaaaatcacgccattgcactccagcctgggcaacaagagcaagactctgtcggggaaaaaaaaaaaaaaaaaaaccaccaccatcattttgcaagtgttaccactattgtgtgttaatattgtagaagtattcctaattatgatttctttgtattcctaattgtaatagctttgtatttgaaaaattattgattcatactctatgttattattttgtatgtgatgacaacagaatatattatcatgctccttttgtgaatctcattcataatataaagtataaatttgtgattttgctttaatttgaaatattaatttcaaatatgttatcacaatttgatacaaactattgacagtaaatctgtggattaagtaatgtcttagtaggtattgggaaaatttgaaactagtaacatggaggactattgtcattgtttatttcaaagccagttaaaattctgcaaagcagtgtacataaaaataatttcaagaaatttataaaataccgagattatggtgtataaacaactttagattctttgtttaagaaattctgccagtttgtaatatatgcttcattcaaagtagctaagggctgtacctggccaatagtaggcacctaatatttgttgaaaaggaatactgagtagctgggacctcctgagtagctgggaccacacacatttaacctgtatttataaaattactgtttagagaataacatttgatggaatcatgcttttactttctgcttatgactcaattgtttgtactgacattaacatcccaaatccttagcatggcctacaaggccctgagcaatgtggcacctgctgaagcctgctgcctcatttaataactctttgtctctttcccagatccagccactctaacattttttagctcctggaccaagacaagctcttcccagaacctgacctttgtacctgttctttattcctggagtatttttcccctgacaaattacttatcatctatcataattcaggttaaatggcactaactcagggaaggcttccctaactgcctcccttctccaaccaaattaggaacaattatatggccacatagtatcgaatcaagtttataattttaaaataattgggagattttgttgtttaacacttgttttcactataagactgtaattacatgcaagtaagaaccatgcctgtttgttcactcctgccacagtcagaatagtgcctggaatatgcagtaagggctgaacaaacactaaataaatgaacaagtgaataaatggatattgtctcatttttagaacagagtactgaagggatcatgaacactatctggtatgtcacgtaggtaatttacaagggctacaatttcagctcagatttaccttttcctggatacaggtcttgataggtctcttgatgtcatttcacttcagattcttctttagaaaacttggacaatagcatttgctgtcttgtccaaattgttactaagaatcaagagagatatctgacatgaaatgacattggaaaacattaaacacgattgaaataatgctagccaatatggttattattagaaaccaattacattttcaacttaaaaacagtaatacttattgcagactcaaatgtgcttattctaaaacaagtaaatgtttgcctatggtctgagattctaatccacggagttcattctaatccacattcaacactatcatgtaccagtgggcctcataacccacctagccctgtgatttttcaggttcacttttctaaacttgtgaattaaatatttattttcttagttcagaagaggaaaaaaactcttgtaattgttgcccatttcaggagaaatcttgcatatgaaaacaagagataaatatacacaactgaggactgtggtttaaacaaaatcttgagaatgttttttgaccttatacatttgtgctttagtataacaaaatgatatagacaaaggtaacttttaatagaaccagtcactaaattaaaaaaatgacaaattcttctgcttagctaagcaacagagaaggtaaaatactaattcaattcatcaatttaagcaatactcattaagagccaagtatgtgcttactgaataagctgctaaggtttggtggttacagagtgtgcggtgaaatgatgtctacatcacagtccaacattcacagagtttaaaagcctaccaagaatcaagacagacacaaatacctaacatagaagtttgtatatgataagagagccagagtacaatttaggagaagaaattgtatggaaggaaggttcatttccattagaccagaaaagacagcacatttgaaggcctgaataagaaatattctggataagatattgtggctgctaccagaatggctcttgatgatctctacctcttggtatttatacccttatataatctctttcctatagtgtaagctggtcccaggtacttgtttctattgaatagaatagaacaaaagaaatgagatgccacttctgagattagattataagatactgtgaatttcatcttgtgccctctccctctctctctttctcttgccctctcatttgaatgaagccaaccggcatgctgtcagtggcccagtgtaagtcctgttacaagaaattgatgattacctgtagccaaccctaagtgaagaactgaggtcctcagtcctacaaatggagagaaactgaatctagctaagaaccatgtgagtgagctgggaagaagatccaccctcagttgaaatttaagatgacatattgagcagacatactgagacacactgaaagtaagagagcaggaggaaacaaaaccagggtcatacaaagaacacaactgattttgagattctcacataagtattacaccttcagtgagcacgtgtactagaaatttaaaaaataaataaaataaaccttcaaagtgagctagcaaataaatttccctatggtctcagctctgagtggagagagaaaatgttccctgtggagtttatagccagaatccagctctcaaacaggtttcagcctgaactcacacaatctgtgtggcttccaaatttgcaagctgagaatttaattcaaagtggtctcaggttgatagcagtccaaaatgctaggtaggaaaaaaaatcctctctggacaaataaatcatcaaagcaagctcataagagcaggtttcaaaggtcatgagcttctaacacacacacaaaaatcacacacacaaaatgggggtagcagcaacatgggtagcgtattcaaacttgaaaagactttaaatatttgtattattagatgtagattatgaaacacatattttaatgtggttaatttttttaaggaatcaaaactatgagtaaagaccaagaaaattgtgctggatggccacttccaccatggctcccctcctatttaagtctgggtactgtgtcacccgaagtcttcaggcacattgttccaggtttgggtttgcctatgaaagaaactcatgagagctggaagtgaggagtgaagaggaggtcttcacataaagcaggcttaaggattagacatagcaggtttgacagatgtgatggcttgcagaatcctttatgagctcccactgtccatctggataagatttacagacctttcagaaattcctataagcttgggttctgtgcccactctctagactgtcaggctaagatctctgatataaaacagacctcttctgattttgtctagctgcttttctaatatctattcaccaagctcttccaataatagcataaggccctaattaatattaaacttttatcattataatacataggatgtcttctgttttcctgatcaaattctgactactattaaaatataaagaattgtccagaaatatataaaaaaagaatcacacattgatcttctttaaatgaaaatataacaattgtatggactaggatgattacagttgttcagttctgactgttatttgaagaaaaaagcaataagaagcctcagcaacttaacagaaggagctgccatttactaggagaaaagattgtggatgagagtgtagcaaaggtcagaattctgtgaagcttgagatgtttattataatgaattatcttttatactcactacaatttcctaacaattttggggtttatatttttgaaagagatatacctttaattttctttctttgtactattgttaggtaactttaatgtgcagattatactacagtgaaagttgccaatgacaaggcaaagtcacttacatcagacccaaagcaaagtggagccgggtcatgaaaaaggggatcttgtgtgtgtgtccacgataagcactatcacaaggactttctataaactcacaagaaatttctgcccacccagcacactctgtttgtccagctcatcctgtaggtgtctctataataggacctatcataaaaaattcctcaagactgcagcatttcagataagccaccctcacaagaacacttgcctagcaatggctgtttctgccagtaagttaacaccagctcctgcatcagaccctgtgaccaatgatgtttgtttcaaaacagcttgcatggacttctttttgtctttatatattttccttacctcaacctcttgggatgcacctatgattgatcatagcacaaatatctcagattataatccttgtttatttccaaataaatttatttctttggagatccactttttctgttattatacattgacattgttattatgaaattggttgggtgatgtgtcttattttcttgtctccagaagaatttctgtaacagtgcaattaaacgttctttgcatgtttgctagaactcacctgtaaaattgtctgagcaaccaaagcctggtttttgtgtttagtttttcttttgtgattggggaggggggtttatcgtactgattcaaggtgtgaaggtaacatcattttgattttatacatcttcttcagtccatttaagcatgttacatagcgttgtttgttcttttcatgatattctttacagtagtctcctaaatgttccctctgcttctgccaggagcccctacaatcaactcagaagctatagagtttaaaacatgtaacatattatgccacctttcttaccgtaaaacatcccatggtttctcatagtatttatagtaaaagtgaaatttttatgatggcttgagaaacttttcccattagatgcccaagtgctggtctggtctgatcttctcatcttcccttgggtgattctgtggcagtcacactagcctccttgctgctccacaaaaactccagcatgatcctacttcaggatatttgccattgttactgcatctgcctggaaccttttctcccatataaacatagagattgctcttgcctgtccttcaagtctattcttaaatgtcccattctctgtgaagctttcctgcccaccctatttaaattacagacttcactcccaattccccatctactttaagagtcttcatttatcattccttgacaaactgtaaatatacatgttcacttttttatcgtctgtctccaaatactggaatgttaagttctgtaatgtcagatatttctgtttggttcactggtgtattcttaaagcatgttacatactaggtatactcaatgaatatttgttgaataaatatcacattgggcttattccagaaattcaagcttgtttcaatagttagagcaatctacaaatgtaattcattacattaactaattaaaggagctaaatcacatcaccaccacaataatgcagaaaaccacatttgatacaactcaatattcatgtctgcctaacaaacatctcatgatactaggaaaagaggaagggatatattattttcatgtataaagcactaaccattgtagcatgccaatatactcaaaattcaatgaaattcctatcaaaattttagcattcctcttagtcctcaacaaagcatttctaaaatgtgtatagaagaccaaagggccaaaagagtcaacttctgaagaagcgcaaaaagaaagttgaggaaatcttaaaacatgttattgagcttaaagttgcaaaaataaactcatgtaccataattgatgagtagaaaaatagactagtggaataacataaaaataaaaacaatgcttacataaaatgttgtaactgatttggatgtcattagaaatcagtaagtaaatagatggacaatgtaatgaaagatgctaggcaaataatgtggtagggagaataatggccctcaaagatgcccatgcctaaccctggaacctgtgaatatgttacactgaatgcaataaaggcttatcagatgtgattaaggatgcaaaccgagatggagagatcttcctgggttacccagatgggcccagtctaatcacatgagttcttaaaaatggagaacctttcttagctgagtccagagagagatgtgacaatgaaagaatggtcagagaaatgtgacattgccagctttaaaaagagagaggagaggcaatgagaaaaggaatgctgatgttctctagaagatagaaaaggccaggatatggattctaccctagccgccataaagaaacatgcctgtcgacaacttgattttagttcactaaaattcatgcctgatttctgacttgtgtacactgtaagatgacaagtttgtgttattttaggtcacttagtttgtagaaatttgttacagcagtaatagaacaagtggttatccatatgaggcaaattagattggatacctatctccaatagaaatcaattcaaggtgaattccaggaaaatacttaaaacatttagattaaaaataaatgagaatttttgttactttttgtaggtcatagaaccaagaaaaacaaacattaaggaggaaaaatgaacatatgactacatcaaaatataaagcttctctatttggatgatatcataaggtgacaaatcataaactgtaatatttacaacatatatataagtgaataaatatacatttagaatatatatgaactcccaaaaatcaacaggaaaaataagacatagaacaagcaaaatgcataaacaaaagaaggcaaaacaaaaataatgactcataattatatgaaaagaagctcatcttcatagatgagcagataaatgcaaattaaaaccaccctgagatgctttttacatccatgagcctgataaaagttagagtctaaaagtaataattaacaaagatgggaagtaacagaaaatcttgtccattactggttaaagtataaactgatacagctactttatagaatattacattatagaataaagttgtgagtatgtatatgcagtgactcagcatattcattgctagtatgtactcaagagaaacttacaggagtggactaggaagtaaatacaaaatgattacaacattgtttgttatatcaaaaaataaaaaagacacccaattttccagcaaaaaaaataagtaaaaataaatcctggtgtattctaacaatggaataatatatagccattaaaataaatcaactattactgtacatatgaatgtaagtatcagcaaaacatattgtttagtgaaaaactaagaagctgaagaagaatatatacaatatggttacatttatatgaagtccaaaaacttgcaaaataaagaaatgtatttagaaatagattcacatgtgagaaaactagaagaaaattaatgaaaggataagagggatagcagtaattctgagtagttgagggaatttcaattggaaaaaaataatatcatattctttaagtcaggtagtgggtattagcatttgttttaccatcgttctttattcttatagctacactatatattttcaatgtatttaatgtattttttgcataattaaatattatgcaataaaaatgagaaaacaaaaaagtagaaaatgataaattacaataaagaaatggagaaaaaattataatctagttgagtaatggtatattacatagctattttcttaagtagatgtatgtacatgatgtatgcacgattgtacatacatgttcttaattatatataaatatatatgtacatatttttaatataaaatactaaacaaagtacaccaaaatattagctcctatgttagtgagataatgttttgtttttttgtattttaagttttacatagtaggtgtatttttctgttttcatactgctataaagaactgcccaagactgggtaatttataaaggaaagaagtttaattggctcacagttcagcacagcttgggaggcctcaggaaatctacaatcatggcggaagacaaagaggaagcaagccagcttcttcgcaaggcagcatgaagaagtgccgagcaaaggggaaagaatcccttataaaaccatcaaatctcgtgagaactcactatcgcaagaacagcacaggggaaactgcccccatgattcaattacctccacctggtctctcccttgacctgtggggattatgggggctatggggattacaattcaagacgagattcaggtggggatacaaagcctaaccatatcagtaggcatgtattgaattttaaactcagagaaaaatactagtgtttttataggattcttactaaagaaaaaccagaaagtaataaaccatctacgctaagacataaaattcagttgtttagttacaagatagaatgtggccttgtaagaaagcaaattaacttctaacatacaaagccttagagaagattcaagtgactgacggatcttaaacagagctattattacaactcgaactgcagtaaaatatcctcagcaacatagatgtgtgtgtttcactagtcagagcaatacaaatttaatgaaactccattggtggtgtttttaatcagacaatttctgaagatgtcctggcttattcacagatgcaagccaaatctctagaagagtaccataataagaaaaaaaagaatacaggcaattgagagctgttccaaagtttagggagtttttgtaaggaattaataaataaaaatgttcttgaaagagagaaattaatatgcagttcatactgccagaattgcaggcaatttatcaaagtcccctaatcctccaaaatcgctattttttttttgacacacactttacagtacagaagaaaatgtctccggcaataaatcacaaagttaaaattacctagtctacaattaactacacagtgatggtaaatcattttctaccaaaagaaagaaatgtcttgtctattcaggttctgctctacttaaaagttttccttgttggcgagcaagtggttagaaaatcatattttatacgtacattcagcttaactatcattcagctcaggaagatgactcagggccttatccataccttgaagtttgctcttagcaagtaattgtttcagtatctatatcaaaaatggcttaagcctgcaacatgtttctgaatgattaacaaggtgatagtcagttcttcattgaatcctggatgttttatttttcttaataagaggaattcatatggatcagctagaaaaaaattaagaggaaaatcacatggaaagttatatattatatatctattatatataatattatatatctattatatattatatattgtatatctattacatatataatattatatatgtattatatatattatatattatatatctattatatatattatatattatatatctattatatataatattatatattatatatctattataaatattatatattatatatctattatatataatattatatattatatatctattatatataatattatatattatatatctattatatataatattatatattatatatctattatatataatattatatattatatatctattatatataatattatatattatatatctattatatataatattatatattatatatctattatatataatattatatattatatatctattatatataatattatatattatatatctattatatataatattatatattatatatcatttccaaattccccagcgttcatatttgtcagtgcaagtaaagagccttactgctgatgaggtttgaggtatgaccatttggccagaatttatgaactctacatgtcgcttgatgtgtgcttcagggtacactttttttttttttttgagacggagtcttgctctgtcgcccaggctggagtgcagcggtgcgatctcagctcaccgcaagctccgtctcccgggttcacgccattctcctgcctgagcctcctgagtagctgggactacaggcgcccgccactatgccctgctaattttt[147 bp omitted]gacactactttgaaggtcataaaaaatataataagagataaggctaatttcctttaataataataaaatcctttaataaaaatataaaggaataatataataattttctttaataaaatataataagagataaggctaatttcctttaataaaatatagtaactacataccaacagaattccaaaaaaagaaatggagaggaagggagcatgggtcattaatcttgtcaaaaatataaaattatatacgaggaattcctagaaactgttttccttgtctgcggccattgtgctgctgctacacaactaccgcaagcagcccttcacgccctcctcccagtacaaagctaattgacttgtgagaaatgttaagcttggaagagtcagcatcgctgcacttattttttattctactctgacattagaataatccttgagtgggggaaaggttaaaaacccccctggataagtgttactaattaatgatgattgttttaaacaatgtttggataatttttccttgtcccttgacataaacttgataaataactgagaagtgagaaggagattagtgggttgattaaattccattcaggtacttaaagttagctccaaaaatttagctatttgtaaattgtcatgcattgttaatgtataagagatgtagatttcatttatctttggtggagcgagatgaagcagtgaatcattgaagactgaaagaaagaaaaaggtcttttcccttttctttaagaagcatcattagttaaaaacatgttagttgataccagagaactatatttaaagggacagcaataagcaaattgattactctggtgattattggagtgacattgccttttagttgtactttcacaaaaattcacaatatttgccaaagtcaagttatccattacactattaatttgtcattcttttgtttatatagtcaatatctctatctcaattggatctatctcaactgcttctaaacaagccaccatagtctctcccatttcaacaatctcttccaagtaccacttcatttcttcttttcatatttttgaaaacttttgaaaaactacctattttcctcctccatttcttgttcattccattctagtggacatggaatctgttcctcctccaaaacggaatttggtcacccttaaattactaaacccaaaacaatatgttgtctttatctttacctctctgtggcatttaatgataagaccactactttcttctcttttacccttctttcttgaattcagtcaaacaacgtacttacattttttgtcttattctccatcttagaaaccacctcagctttctccattcagctataaaattgtgcttttcctcaaagattaatctgcctctcctctcactctatactatctctgttagctaattttatttgtgcacattgcttatactgggcattatatacacatatgcatgtgtgtacatgtgcacacacacactgtatgtggacatgtatatatatatgtgtgtgtgtgtatatatagtatatatataaattacaataacataaaggtggcattttaaattagtggaaattaccctgatttgatcactacacattctatacatgtaaagaaaatatcactctgtatcccaagaatatgtacaattatggtttgtcaaatgaaaaagttcatacattgaaaaattttagataaatatcaaactttctctgaaactgtaactgtaaaatgtaaaaaacagtaagtgctatattgcttatttctgagtagaagaatatgagacatttccctaatcattatgtgtaattacaattacatatatatatgtaattgtaattacacataatgattagggaaatgtctcatattctatatatatagacagaaagagagaaaatatatgagggagagaaggaatctttccatctcctttgagttccacggtgttgagagtcaggacaactgcaattgcttcatcatgcctgcttgcaattatagggcttttgaaccatttgttccctccttagatatcctcatttttttcagattcttgcttagaagtcactcctccgtggacctcctctgacatattaaacattgcagtccattataagctgcaagaggacagggatttttgcctgttttattccctactgtatcaccaggggctacagcaatatctgacaaacagtgggcatgtaatgaatatttgttaagtgaagtaataaattcaatcaaatcacaccacctgtttaaagcacttcattggcttcacattgcacttagaataaagagaaattctttttatacaatataagttcctgcagaatgcagacactttctacttctccagcctcttttcgactcctctcctactagcttctgtatttaagccacattagacctttcttcagttttttatatagactttgtcgcatcacacctcagagattctgtacatgttcttcctcctgcctagaaaggatcgtccctccactttcgccaactaatccctgctcaacttttcatctcagcaggaggcccattctctttggcaatcctctggcctccagcccatttattatatgctcacatgtcaacatgtacttcgtacagcatgtaacacaattgcacttttatattttaacaaattatatttcccatattgaactgtaagtctcctgaaagcaggaattttgttcttgctcatcatcaactttttcaacatccagtgcaccatttagaacttagatgtagtcaatagaggtttgtggaatgaaagaggaaaagaaagaattaatattcctttaaattaggatggcaaagatcatatatagaaaattggctaagttgtggtccattcatgtttgctcccaattaaggagcacagctatgaaaaggaaggcttcaaattaataaccaatagatttttttaaaaagaaaactggccaggtactgtggcttatgtctgtaatatcagcatgttgggaggccaaggcaggattacttgagcccagaaattccagaccagcctgagaatttggcaaaactctgtctctacaaaaattacaaaaattagccaagtttggtggcatgtgcctgtagtaccagctacttgggaggctgaggtggaagaatagcttgagtctgggaggtcaaggctgcaatgagctgtgattgcaccactgcactcaagcctgggtggtagagtaagaccctgtctcaaaaaaaaaaaaaaaaaagaaaaatcactaagcaaaataagacatgtgaaggatcatgtcaaaggtaagaaaaattaggggaacattaaaagctttcttcccaagccactaaatcaacttgactaacaaaattaccacttgatttagcattagaaaattacattacatatcaaacataaacccattaatcaaatactaaagaaatttctgagttaaatggtataatgttagcttatgccagagctgaccttgaaagattgttcaaatatggctcagtgtgattgaaagttctgtgtgaatatgtttttggaaagatccaacagcaacaccttagtgtatgtttttgaaataaaatgtatctgagtagcagcaaagttattctcaaatttccattttatagctggagatgttataccgtgacgtatatgataggacccaatatggatcaatcccttttagaagtcaatcaggaagaggggagcagttaaaacagttgcttggtttacaaacattagaacaattttcttattcacaccatctgattattgtattttattttttccccaacgtttagactacacaatgagttaagaatgataaaaataagctcaccaatatactatgtacatatttaccaaaatctgtgcatgcttatacatataaacacagctgataatttattagttaggctcatttgtaatttttgtcactatagaccagttttttatttaaattgaagattagtatacattttaaatgattagtcaaaataaaaaatctaaaatgtgctctaaatacctcttaggtcagaaaaaaaaagtcaaaagctagagtatagagaaattaagaaacgccctaaatttctaatctgacaaaaattcatacaagatttaaatattttaatggaaaatagaacagaactaattattgaagaaattatagaaaggaaacaaaataaacagattatatggaggatttttagaagataagtaaataaattaatatactaggaaaaaacaagggaaatatacttgataaataaatacaggtaagagttcttttgaaataatgataaaatagaaaatctctgtcaaaactaaaaggaaagatgcataaatatataaataaatgataaaaaatgttgcatacatatatgactttttcagaatcaaaaaatttaaatttctgtaataaaatttaaatgtttataaatttaaaaaactagaagaaagaatgttgactgttcacaatacaaataaatgacaaatatttgaggtgatggatatgctaattatccttatttgatcattgggcattgtatacatgtatcaaaatatcactctgtatcccatgaatatgtacaattatttgtctcaaaaacaaacaaaaaaaagataatgggagaatgttgaaaactcagagagaagagcaactctcacagatagggatccagataacattagcagctgatttctcggcagaaaccttgaaggccagtaggcagtggattatatatttaaaataatgaagaaacctgtcaattgagaaatatatagctggaaaacttatccttcaaaaatgaaggagaaattaagacatttccggatttttttttaaaactgaaaaaaatccatttatccctgaatttgacattcaggaagtgttaagtccttcaggttgaaataaatgaactctaggcaataactatgtaagtaaataagcaagctgtatgaatatacaaagctctctggtaaaggtaaatacataaacaaacataaaaacagtcctattgtaattttggtttgtaactctgctttttattttctacataatttaaaaggcaaatgcataaaatgtaattgtaaatctgttagctggtatacaatgaataaagatataatttgtcacatcaataacataaaaagagtagagctatatatatagcagtagaattttggtatgtgattgaacttaagttgaaataaattcaaattaaaatgttataactctaggatgttatatgtaattctcatagtaaccaaaaatgaaatatatatagaatataaacaaaaggaaatgagactagaaacaaaatgtgtcactacaaaaaaatcaactaaagataaaaaagaaataattgagaaaatgattggcaaaaatcagtaactctgacgtattaaaactttccatgctacataaatctgaaaactctatttcacataaaactggagctgaaagaaacaaatatttacctataaagttaaaagttatatagggaacaaacactaatttttttttagaaaaaattataaaaagagtaaaaatatgccttatactaccgtaatttcatgttttacagctctgggaaaatagaaaataaaatgttctgttagcatgaatccctctgtgcccccaaaaaaccctatggattgcatcattattacctaaaaagtctattctcaaatgcagcagagtgatattttttacaaggtagatattaattttagatatggaataatattggtgatttcaattttataacactgggttaagatgaaagaatgagaagataaaggtccctcagcaatataactcacaaacatgttcagaagcagtaagaagttacattaattatcttttgaaagtcgataatctacatctttaatgtatgcatatagcatagctaatgtactatcgctgggtccatttattcaatgaataattgccgctatgtgtcagacatttttctaggcctaggaatggatacataagtgaacaaagcaaagattctggttcttgtagagtttccattaaaagacaatttagtaaaacttttcttcccccaaattataaaatctgtaagatggtttaacaacatgtgtaaaagtcattgtgggccaggcacggtggctcataccaggtgtggtgactcatagcactctgtcacccaggctggagtgcagtggcacaatctctgctcactgcaacctctgcctcctgggtacaagcgattctcctgcctcagctttctgagtagcaaggactacaggtgcacaccatcacgcctggctaatttttgtactattagtacagacggagtttcaccatgttggccaggctggtctcgaactcctgacctcaaatgatccatctacctcggcctcccaaagtgctggaattacagatgtgagccacaatgcccggccttattttctacaactttggtaactttagcatataccccaaatctgtaagacataatattataattcaaatgcaactcatggcttctcattgtactctttctctagcttttgaattatttattctaataccagttttaattctgacacaaaagcatgggagttctaatcaaaatccaaccttttatcataaaaactatgaagaaattatgagtagaatttaaaaaggaaaataggcctattaattagatttgtctttgtagcatttaactctataataaataatattttatgcctatgagtccccaacaaagcctccagcttctatttagatataaactgtaaaagtcactactggatccacaagcaagactatggtaaataaatttctccacctaaccagcttcttttacatgatgttacatgtttcttttgttttttcattttggcaaatattgattgtcatcttcgtgtttgtctatgtcctaagtgctgggatacagaatctgaaaagatggacacaggacctgccttcaagttcacccccttttttttttttttttgagatgcagttttgctcttgtcacccaggctggagtgtaatggtgagatctctgctcactgcaacctccacctccagggttcaagtgattctcctgcctcagcctcccaagtagctgggattacaggtcccagccaccacgcctagctaatttttgtatttttagtagagacagcgtttcatcatgttggtcaggctggtctcgaactcctaacctcaggtagtcgacccacctcggcctcccacagtgctgagattacaggcatgagccaccacgccctgctaggagttcacgctttagttggggaaaatatacaataagcaagccagtttttaaaatgagaactgcaattagagttaaatgctacaaagacaaactcacaggaagatgggatgtagaatgataaggctctcagaatagtaagagaaactattgcttcttacgatgtttgtctttctttgtatcggtgctcagctgagtctgcagtgcttcagaggcagctttcattttataaaaatctatgatttctccttccagttgttttttctcttcctcgagcttccttatctcctcctgttgaatcattttaagatgctcgaacttgtcctgcagctgtgaaaccaatgtgcagttgtgacaccaaagcagtgtggctgaacacctaaaagaatacgctttttttctgattatcaaacaaacccaaatcatcacagtagagcacgatcttaataacaatctcaaaaactcaggagtaaacactcagatatggaatttttcttttctttcttttttccttttataagatggagtctcactctgttgcccaggctggagtgcactggtgcgatctcagctcactgcaacctccatctcccagttcaagtgattctcctgcctcagcctcttgagtagctgggactataggcatgcatcaccactacaggcgtgtgccaccacacctggctaatttttgtatttttagtagagatggggttttgccatgatggccaggctggtctcgaactcctgacctcaggtgatcctcccgctttggcctcccaaagacttttttttttttttaatatagagacaagttctcagtacgttgcccaggatggtctcaaactcctgagctcaagtgatcctcccacctcagcttcccaaagtgctgggactgactggatgcagtggctcatgcttgtaaactcagcactttgggaggccaaggtgggaggatcgcttgagcccaggagttcaagaccagactgggtgatataacacaatagtcaacttcaacaggagagagaatctgtaaacttgaatatagatcttccgaaattatccagtcagaggacagagaaaaaaagaataaaagagagaaaagaaggctgggtgtggtggctcaagcctgtaatcccaacactttgggaggccgaggcaggcagattaagaggtcaggagttcaagaccagcctgtccaacatgacaaagccccatctctactaaaaatacaaaaattagccgggtgtggtggcacacacctgtagtcccagctacttgggaggctgaggcaggagaatcacttgaacccaggaggcggaggttggagtgcaatgtgagccgagaccacacattacactccagcctgggtgacagagcatgactctgtctcaaaaagaaaaaaaaaagagacagagaaaagaaagccaacaagacaccattaagcaaaccattgtcaggttatgggagtttgagaaggaaagtagagaaaggagaataaagcttatttaaagaatggctgacaactgcctaaatcatgggaaagatttagacatctaaatccatgaagcttaaagattcctaaagaggttcaaaccaaatagatactcaccaagtcacaatataatcaaatagtcaaaagttaaagaaactttgcaggtcaggacagaatcgaataatacattcaaagtgctgaaagaaaaaaactgccagcaactaatactatgtctgacaaagctgtccttcagaaaggaaaaagaaataatgtgtttcctcgacaaacaaagctgagggcattcaggaccactaggtctaccttaaaaaaatgcttaacggagtttttcaagtaaaaatgaatgaagttgggagcggtggctcatgcctgtaatcccattttgggaggctgaggtgggtggatcacctgaggtcgggaggtcaagaccagcctggccaacatggcaaaaccccacctccagtaaaaatacaaaaaattagccaggtatgaaggccactgagatcgtgccactgcactccagcctgggtgacaagagtcaaactacatttcaaaaacaaaaaacaaaacaaacaaaaaaaacaaaacttgaggcctggccttctgctcctctccaacctccccttctctgggcccaagccaccttggctgaggagggggcgaggaggtgtgagcccctgccaggaaccccctgcccggaccaagtgctcggcccccaggcctgcgttcagtgaggcctcccgtggcgtcagcatgttcgtgtggaggaatgtggaaggtcactctgcggccgtgttctcctggtactccatccccttcctgacccctccctgcagccacacgaggcccagcaacctgccagtcactcagtggcctccaaccagagaaaacaacctgccaagttggcagccgttgctcatgagcgtccaccaggtgggacagggagtgttgaccctgggcagccccctggagccacctgccctgaaagcccagggcccgcaaccccacacactttgggggtggtggaacctggtaaaagctcacctcccaccatggaggaggagccctgggcccctcaggggagtccctgctggacagtgagacagagaatgaccatgatgatgctttcctctccatcatgtctcctgacacccagttgcctctaccactcagatgatgtcaggcccagtccctcagtgccctgcgcaaggaacaggactcatcttctgagaaggatggacgcagccccaacaaatcagacaaggaccacatccggtggcccatgagtggcgctcatgatcttcagcaggcggcaccaggccctggcggggcgcaccagggtcatcccaaccaggataaccggaccgtcagccagatgctgagcgagcggtggtacaccctggggcccaatgagatgcagaaatacaacctggccttccaggtgaaggtggcccacttgcaacaaggaccgaaagaagtccagctcagaggccaagcccacaagccaggggctagcaggagtgtaacaagggctcgtgggagcggagcatatcagagacgggcactgccactgcccctggggtgtcctctgaactcctgtcagttgcagcccaaacactccagagctcggataccaaggagcagcttctgtggggcagaacggctgcacacagtcagggaacctggctcagcctggcccaagccttctcccacagcggggtacacagcctggacggcagggaaatagaccgtcaggcactacgggaactgacacaggtggtgtctggcactgcatcatactctggcccaaagccttctactcagcatggagctccaggccactttgcagcccctggtgagggaggtgacccgtgggcagccctgctgccgcccacgtgagctgctcattcccagcacatggccagcgaggtcatagcgagtgacgaagagcacacggtcatccatgaggaggagggggtgatgatgtcattgctgatgatggctttagcaccaccgacaccgatctcaagttcaaggagtgggtgaccgactgagagtggggacaactctggggaggagccagagggcaacaagggctttggtgggaaggtatttgcacctgtcattccttcctcctttactcctgccgccccttgctggatcctgagcccccagggtcccccgatccacctgcagcttttggcagtctatggtcacaccctgtcctcctcctacacatactcggatgcttcctcctcaaccttggcacccacctccttcttactgggcccaggagccttcaaagcccaggagtctggtcaacgcagcagagcgggccccctacggccccaacccctggggatgggggcccagggacgccttccaaggtggcctgtttcctcccaatggatcctgccaccttctggtgcaagagacctgaaagtgtgggcgacctggagctaccaggctcctcagtcatcagggtccctcccaatactaaggctttcctaggcaggagctgggctgagccacccggggggcagagcctgaagagaaactgactgggctttcggggtcggggcagagggaaccccacggacatggatcccacactggaggaccccaccgcgcccaaatgcaagatgagaagatgctccagctgcagtccaaagcccaacacccccaagtgtgccacgtgtgatggggacagcttcccctttgcctgtacaggtggagaagccgaggacaggctcagggaaccggagaccgagaaggcgctgtcctcttcactgcacgtaccctggaccagtgccggccctgatcatgcagctcttccaggcccactgcttcttcctgtccactaggccacagccgccctccaggcccactatgcacacatcttcccctccaaggtttgttctgcccctgccctgactcccagccctgtgggggtcctgaccgcacctcacctggctcagactcttgacgctgccctggctgccccaccactgcttctgcccgagagtcacgtgaggctgagagtaggggcaggggcagcagtggtgccagttggggggcggtccagtgggaggagcctcagcctcgcaggctgctccgtgggactgatgactgcatgatcttctgggcacctcacggatcttcaactgcaggtgaaacggatgctggtggtgggtgcagggccgctgggagctgctgcatggttcccagaggctggactgaggcaggtgccaactgaagctgctggggcagcatgggcaggatgttctgcacacaaaccttggagaagaagatgtgtgcatagcaggtccactgctgctgcccctgccctgactcccagccctgcctgaccccacctcaacctgctcaggctctggcacaaccctggctgccctgccactgcctctgccccagagttggggccttgacagcctggttggaaggggacaccccagccctgcctcaacacctgggggtctccataactagcacaggcaggtgggcaaccccaaagatcccaggactcacagtaccccctgagaacatggacagtatgtgggggtagcaatggagggcaggatggttatcttctcccaggtgaagccatttaatcctttcagtttgggacggagtaaggccttcctctttttttttttttttttttttttttttttgagaccgagtcttgctctgtcgcccaggctggagtgcagtggtgcgatcttggctcactgcaacctcttcccgccgggttcacgccattctcctgcctcagccttccgggtagctaggattacaggtagacgctaccacgtccggctaatttttgtatttttagtacagacggggcttcatcat[136 bp omitted]tgtgccgggggaaagctgggcagtttccctcctccgagcccctgtacataccatgaattgtgggaccttcagagcttttcacttttcggaaaatagctcctgctggggctacaagatggagtgtgaagagggccttgggccacagggaggcgcctgtggactagggggagttcatgcaccccttctttccccagaggggctggactcaggtgagtatgggggtgggggctcctgcacttcgacacaggcagtgggagggttttctccccattccctctgcactcccaacttgagctatactttttaagaaagtgattcaccctgcctttgcccccttccccagaacagaacacgttgatcgtgggcgacatttttcattgtgccaaaaagttgccatgaccgtcattaaacctgtttaacaccaaataataaggaaaataaaataaaaaactcgggcttgacgcagaaactcactccaaataaattacctaccaaaacatttacataatggtggaaatattccaaaattcaatattttgggatttatacacaaaagataaacaaattagaggccaagaggctgccggaagggaaaaacggggcctggaatggccgacgtgaggaatgagctgggcctaaagaggccactggcaggcaggagctggacctgccgaagtggccgaaaggcaggagctttggactggggaggccgcagtgaggcgagagctagctgggcgtggagagtccgctgtgaggccgaggccgaggccgggcccgtgcaggccttcgagaggcaggaggccgggcctgcaaaggccgactggagatcaagttctgcgcctgaagaggctgccaaaagtcaaaagcagggcctgcgaaggccgccgagagccatgagctgggctgggctgaaagaggccactgggaggcaggaggagctgggcctggagaggctgactcgaggaagttttgcacctggagaggccgtcgagaggacggagctgggcccagggaggccgacttgctgctcttccaggcccacttccaggccgacttgaggacgacttgggcctgcagaggccgccgggaggctggagctaagcctggagagactgacttcgggacgatttgggcctgcggaggccgccgggaggcccaagctgggcctagaggagcccaccgaccggaggccatttggggcctgcagatgtcatcggagggccaggagctgagcctggagaggccaccgcgaggcctgagctgggcctggggagcttggcttagggaagttgtgggcctaccagggccgctgggagctgggcaggagctgagtccaaagacgttgttgggacctggagtcgggccagagtccggcctggagatgcagccgggaggaagagctgggcccggagggggcgccgggaggctgcaagtgggtctgagaggccaacttgaggaggcctggcctctgcctcccgcattgcccagctgttcctcctggctgcatctcccacctcccagcaaacaagctcttttggctcagctcccgcctgcgtttgtagaccccgaagtttctgcaaccaagctcttcagacccacatcccttctcccagtgactgaacagtcccagctccggctggagaagggcgtctgcagaccccgctgttgcctcccaggggagtctccaggcccagctctcgccccaccgcgacctcccaggcccaagtccctgcctacctcccagcagcccgagtgcgatcctgttcctccctcacggtggcctgttgaggcagggggtcacgctgacctctgtccgcgtgggaggggccggtgtgaggcaagggctcacactgacctctctcagcgtgggaggggccggtgtgaggcaaggggctcacgctgacctctgtccgcgtgggaggggccggtgtgaggcaagggctcacactgacctctctcagcgtgggaggggccggggtgaggcaaggggctcacgctgacctctgtccgcgtgggaggggccggtgtgaggcaagggctcacactgacctctctcagcgtgggaggggccggggtgaggcaaggggctcacgctgacctctgtccgcgtgggaggggccggtgtgaggcaagggctcacactgacctctctcagcgtgggaggggccggtgtgaggcaaggggctcacgctgacctctgtccgcgtgggaggggccggtgtgaggcaagggctcacactgacctctctcagcgtgggaggggccggggtgaggcaaggggctcacgctgacctctgtccgcgtgggaggggccggtgtgaggcaagggctcacactgacctctctcagcgtgggaggggccggggtgaggcaaggggctcacgctgacctctgtccgcgtgggaggggccggtgtgaggcaagggctcacactgacctctctcagcgtgggaggggccggtgtgaggcaaggggctcacgctgacctctgtccgcgtgggaggggccggtgtgaggcaagggctcacactgacctctctcagcgtgggaggggccggtgtgaggcaaggggctcacgctgacctctgtccgcgtgggaggggccggtgtgagacaaggggctcacacctctctcagcgtgggaggggccggtgtgaggcaaggggctcgggctgacctctctcagcgtgggaggggccggtgtgagacaaggggctcacgctgacctctctcagcgtgggaggggccggtgtgaggcaagggctcacactgacctctctcagcgtgggaggggccggggtgaggcaaggggctcacgctgacctctgtccgcgtgggaggggccggtgtgaggcaagggctcacactgacctctctcagcgtgggaggggccggggtgaggcaaggggctcacgctgacctctgtccgcgtgggaggggccggtgtgaggcaagggctcacactgacctctctcagcgtgggaggggccggtgtgaggcaaggggctcacgctgacctctgtccgcgtgggaggggccggtgtgaggcaagggctcacactgacctctctcagcgtgggaggggccggggtgaggcaaggggctcacgctgacctctctcagcatgggaggggccggtgtgagacaaggggctcacactgacctctctcagcatgggaggggccggtgtgagacaaggggctcgggctgacctctgtccgcgtgggaggggccggtgtgaggcaaggggctcacgctgacctctgtccgcgtgggaggggccggtgtgaggcaagggctcacactgacctctctcagcgtgggaggggccggtgtgagacaaggggctcacgctgacctctgtccacgtgggaggggccggggtgaggcaagggctcacactgacctctctcagcgtgggaggggccggtgtgaggcaaggggctcacgctgacctctgtccgcgtgggaggggccggtgtgaggcaagggctcacactgacctctctcagcgtgggaggggctggtgtgagacaaggggctcacgctgacctctgtccacgtgggaggggccggggtgaggcaagggctcacactgacctctctcagcgtgggaggggccggtgtgaggcaaggggctcacgctgacctctgtccgcgtgggaggggccggtgtgaggcaagggctcacactgacctctctcagcgtgggaggggccggtgtgaggcaaggggctcacgctgacctctgtccacgtgggaggggccggtgtgagacaaggggctcactctgacctctctcagcgtgggaggggccggtgtgaggcaaggggctcacactgacctctctcagcgtgggaggagccagtgtgaggcaggggctcacgcctctgggcagggtgccagaggcatgagttgggcatcaacaggccaccgtgagggaggagctgggccgcacgcgggctgctgggaggcaggcagggacttggccccgggaggccgccgtgggggcaagagctgggcctggagaggcccctgggaggcaagggcggggcctgcagaggctgttctccaaccagtgctagaactgtacaggccaccaggaggcaggaggtgggccctcagagcttggctggagaaagttcggggcctacaaaggcggttgggagctgggcaggagttgagccaaaagagcttgcttacttgctgggaggcagggccgggagagcccgacttcaggacaacttgggcctgcggcagtcgccgggaggcccaaccttggcgtggaggagcccaccgaccggagaccatttggggcctggagatgccatcggagggcaggagctcatcctggagaggccaccgtgaggcctgacctgggcctggggagcttggcttgaggaagctgtgggccgaccaaggccgccaggagatgggtaggcactgagtccaaagaggttgttgagaggcaggaatcgggcctggagacccaaccaggaagaagagctgggcccggagagaacgcccggagggtgcaagtgggtctggagaggctgacttgaggaggttctgggcccggagaggccgccggaagggaaaaactgggcctggaaaggccgttgtcaggaatgagccccatgggcctgaagaggccactggcaggcgggagctgggtgtgtagaagctgctgaaaggttgggagcttggcttggggggtccacagtgaggtagatgctgggcgtgaagaatctgctgtgaggcagacgttgggactgtagaggctgacgggaggcagaggctgggcctggaggggccaccaagatgcaggagctgggcctggagaggctgcaaagaagcatgagctgggcctggtgaggtcgacttgagaaagttcagggcctggagagaaggctgggaggcaggagctgggtctaaagaggccattgtaacgatggagctgtgcctgtggaggctgttgtgaggcagtagcctcatctgcggaggctgccgtgacgtagggtatgggcctaaataggccattgtgagtcatgagcttggtctgtagaggctgactggagaaagttctgggcctggagaggctgccgggaggtaggagctgggccaaaagatgtaagcacatttgcatttattaggcactttatttccattattacactgtaatatataataaaataattatagaactcaccataatgtagaattagtgggcgtgtcaagcttgttttcctgcaactggatggtcccacctgagcgtgatgggagaaagtgacagatcaataggtattagactctcataaggacagcgcaacctcgatccctcacatgcacggttcacaacagggtgcgttctcctatgagcatctaatgctgctgctcatctgagaaggtggagctcaggcgggaatgtgagcaaaggggagtggctgtaaatacagacaaagcttccctcactccctcactcgacaccgctcacctcctgctgtgtggctccttgcggctccatggctcaggggttggggacccctgctcaagtgcatccaaagcgacccttcccacaccagtcttcacagtggtcaagggcagcaaccacttagctcccaaggcatgtgcctcagctggcatttcgtcacaatcaacagtaagtggtagcttgagtcactgtgaggtcacctactggaaatcaccagcatcccatttcccactggcaaagagctcagcactgccccctgggaaaccaaacctatgcccaaatcccatctgtgtgggtttacctcctgggacccttcctaacatattagtcagagtccaatcaggaagcataaaccactcaaaagtttaaagtggtaaaatttaatacagagaattattcattataacaggtgaacagcataatgagagattggctagcacagagtaaagataactctagagaatatgggactagcccaggccaggcatggtggctcatgcctgaaattccagccattacagaagctaatgcaggaggattgcttaaggccaggagctagagaccgctctggacgacacagtgagaccctgtctctatccaaaagaagaaaaaagttagctgggggtggtggtgcacacttgtagtcccagctactcggaatgctgaagtttgagcctgggaggtcaaggctgcagtgaggcatgattatgccactacagtccagccggatgacagagcaagaccctgtctcaaagaacaaaaccacaacaaccatttacagacagaaaagaaatagagctaataagctgaggaaagatgttgaaatgtgacaagtaaagtaatatgaggtcttttgtctatttaaaataatcaaacaaaaaatggcttactaaattataataccctgtgctggcaaaggtgcagtgaaatgggcactttcttatactatgaggggtggttaaattgtgtataagccttccagggtaaagcctgtcaattttttaaaataatggagacagggtctcaccatactgccatactgcctcctccaactcttggcctcaagcaatcctcctctcttagcctcccaaagtgctaagattatagctgggaggcacccaaaaccctgtcaatttacatcaagggtaaggagaatgtccattcaccatgactcacagtaatcttacttctggggagacaattcaatctaagcaaaaggtcatctgtacacacacagtaaaaatctgggagtaactgaagacagagttggtaagtgaaataagaaacagttataagaaattaaactatggtatcaataggcacctggtaaaaggtcagttgatgttagctgctacttttttgttgttttgagacagggtctcactctgtcacccaggctggagtgcagaggcctgatcatgactcactgcggtctcagcctccctgggctcaagtgatcctcccacctcagcctcccaagtagctgggactacaggaacatgccaccacactaggctaattcatgtatttttctgtagggatggtgactccccctttgtttccaaggcctatcgcaaactcttggcctcaagccatcctcctgcctcagcctcccaaagtgttgcgattaccagtgtgagccaccacacctggccagctgctacttttatcaatattattcttattccactcaattaaaaattattattttcaaggctatgcaacagtatgtatcctacagcgtaattgtaaaaacatacacagtcgtcatccctcagtatacagaattagttccagccccccatctctgcatataccaaaatccatgcttactcacgtttcgctgtcacccctctagaatccacgtatacgaaaattccaaatgttagttgggcatagtggcaagcacctgtagtctcagccacgtgggaggttgaggtgggaggatcgcttcagcctggaaggttgaggctgcagtcagctgcgatagcactactacactccagccttggacaacagagggagaccctgtctcagaaaaaaataaataaataaataaagcaggttagaaactgtgatgaggtctgctgggcaaaattccatataagcaaagtataaattaataaagcaaatcgtgataaattagtacgattgactttctggagtttctgacaataaaagtaaggaaaatgcagaacacaaagacagagagtaaaaagagaaattaggaaagcattctacatgttgaataggaagacactggccatgttcgtgcagcggcagtatgtcgtgacatgacataccttggagagaagttaacagatgaggaagttgataaaaatcatcagagaagcaaaatactggtagcgacactcaagtaaaccatgaaatttccataacttatgtcagcaaagtgggaatattgtacagtgtgtgttgaagttcctatacaacattgtttatctgccttttgtttgtttgtaaggaatgtatatactaaaagttcttcttgctgtcaaaagaatatgcgtgaataagtcattttaacttattcttctgtttttcttttatcttcctgccatcatcccacagccttactttagaaatttcttttttagaaaattgaacaagtgctccttgtggtggcacatacctcgaggatgggaggcaggggtggaagggtcacttgaggccattagtttgacaccagcctggccaaaaaagtgagaccctgtgtctacaaaacaatttaaaaattagccaagtatcgtcatgtatacctacagtcccagctacctgaacttactgagaaagttcagggcctggagagaaggctgggaggcaggagctgggtctaaagaggccattgtaacgatggagctgtgcctgtggaggctgttgtgaggcagtagcctcatctgcggaggctgccgtgacgtagggtatgggcctaaataggccattgagagtcatgagcttggtctgtagaggctgactggagaaagttctgggcctggagaggctgccgggaggtaggagctgggccaaaagatgtaagcacatttgcatttattaggcactttatttccattattacactgtaatatataataaaataattatagaactcaccataatgtagaatcagtgggcgtgttaagcttgttttcctgcaactggatgttcccacctgagcgtgatgggagaaagtgacagatcaataggtattagactctcataaggacagcgcaacccagatccctcacatgcacagttcacaacagggtgcgttctcctatgagcatctaatgctgctgctcatctgagaaggtggagctcaggcgggaatgtgagcaaaggggagtggctgtaaatacagacgaagcttccctcactccctcactcgacaccgctcacctcctgctgtgtggctccttgcggctccatggctcaggggttggggacccctgctcaagtgcatccaaaacgacccttcccacaccagtcttcacagtggtcaagggcagcaaccacttagctcccaaggcatgtgcctcagctggcatttcgtcacaatcaacagtaagtggtagcttgagtcactgtgaggtcacctactggaaatcaccagcatcccatttcccactggcaaagagctcagcactgccccctgggaaaccaaacctatgcccaaatcccatctgtgtgggtttacctcctgggacccttcctaacatataaccttcataacatacttgagaggctgaggtgagacaatcgatttagcccaggagtttgagatcagcctggacgacataactaaatctcatctctacaaggacgaggtgggaggatcacttgagcccaggaatttgtggccagcctgggcaacaaaagaagaccccatctggccaacatggccaacctggccaccacggtgaaactctgactctacaaaaatgatctgggcatgggtggcatgcgtgtgtagtcctagctacttgggaggttgagatgggaggattgcttgatctcagaaggccaaagctatagtgagctatgatcacatcactgcactccagcctggatggcacagggagattctgtctcaaaaaaaagaaaagaaatatatatttaatctctgtccctggttcctggcacagagcttctaaagctcttacaaagacctcagtgatagatgtgacaggagcatcttttgttttaatatttggtcttggtcccaggtttctaacacaagagcctctaagaactttgggatctccagcatggtaagaatgcatttggggatgttgttgagatgactgggtgactgcaagctcctaaatttcttcaagaggagggctgattaccatgaaaccacatggtaagaggcttggaactttcagcctcatgcactgaactccagggggaagaggggctggagactgacttaatcaccaacagccaaaggttttatcaatcatgcttgcataataaagcctccataaacaccctgaaaggggtgtgcagagctttcagggttgctggacacaggagatgctgggagggtcgcatgttcaacagagggcatgggagctctgtgcccctccgaacttaactttccctgggtatctttcttttttttgagacaggatcaggctcttttgtccaagctggagtgcagtggcacaatctcagcttactgtaacctaagcctccccagtccccagctcaaggtatcctctcatctcagcttccctagtagttggaactctaggtgcacaacaccacaccagttattattattattttttaattttttatagagacaggttttcaccatgttgcccaggctggtctcaaactcctgagtttaagcgatcctcccaccttggcctcccaaagtgctgagattacaggcatgagccactgcatccagcatgcacgtctctttcattgactgtttctgagatgtatccttcacaatgaaccagtaataggaaatgaactggccagatgtggtggctcacatctgtaatcccagcactttcagaggctgaggtgggaggatcacttgagaccaggaatttgtggccagcctggccaacacaacaagaccccatctatacaaaaaataaaagaaactagccagatgtggtggtgcaggcatgtagtctcagctactagggaggctgaggtgggagaaccactggaacccagacaatcaaggctgcaatgagctatgactgcaccattgcacaccagcctgggcaacaaaataagaccctctctctcagaaaaaaagaaaataaactgtttttctgagttccgtaaactgttctagcaaattattaaacccaagaagacagttacgggaacccccgattggtaacaggttggtcaaaagtatggtgacaacttaggacttgccattgtcatctgaagtgaggatggcctcgtgggactgagcccctaacttgtggggtctgtgctaactccaggtagtgtcagaataaagtcatgggatacccagttaatatccagagcactgaagaatctggtgtagaaactccatacatacattcagtcggaagtgtgtgagtagagacaaacatgggcttttctgtcacctacctgcttaactgcataggagaggcaatatgtggtgctcatgaacaaagcaaacattaaagtcagaccagacccaacatttgactcagtcttaatatccaggtgagcctgcgcaaatcattcattattcctaaggttttcatcactccattcataaaatggggataactgtggcacctacatgtgattctgtgagaattaacaaaatattatgcttggggttattgtgatcattatacctgttccaaactatttgacaaggacagtgatggatgaagacatcaaaaaatcagaaactgcaatgaggtctctcaggcaaaattccatacaagcaaattactgtgtctacaaagcattcctgccacacttaattcaccattccctgaacaaaatatgccatcttcattgttcaggtctgtacagtgctggtgtcccttcccgggcagtttgcgctatcccatcccggcccattccccatccctccacctcccccttccctccccactctcatacaactcttcctcatctttcaggacttggcttcaatgtcaccttaactggaagcttctctcactctccagaagagcttcccattgcacctgatgcatgggaaacataatttgatcatttttaagttacagtccaaatctttttgtacctgaataacatgttgcccagtcagtctctcttcctggattcacaagtctttcatggtagatccagctggaagtgacaaaaagacatcttttgacataaagggatgacacagacagacataagttcttaaatgtcttaaatgttatgtgaaaattaaacagaattcaaagacttgtggggagcacttaggaagttactgggaatgtcataaagggttaatttgtattttattttattttttgagacagtctcattctgtcacctaggctggagtgcagtggtgcaatcaggctcactgcagccttgaccacctgggctcaagtaatctcacttaatttttatttggtttaagaaactcttggttgagggtggtggcttatgcctgtaatctcagcactttgggaggctgagagaggtatattacttgaggccaggagtttgagatcagactgggcaatatattaagaccctgcctctaccaaaaaacagagtgaacgtgtggaagacaatttttccacagactgggaatgagggaataatttcaggatgattcaagtgcattacatatattgtgcactttatttctattattactacatagtaatatataatgaaatgattctacaactcactataatgtagactcagtgggatctctgagcttgttttcctgcaactagactgtccacctggggtgatgggagacagtaacagaatatcaggcattagattctcataaggagtacacaacctagatccctcgcatgcacacttcacaacagagtttgtgctcctatgacaatctaatgctgctgctgatctgacaggacatggagctcaggtggtcatgcaagcgatgggaggggctagaaatacagatgaagtttcccttcactcgcctgctgctcacctccagctctgtggccctgtggttggagaccgctgctcaagtgcatttgaaaggaaccatcccacgccgttcttcagagtcatctttactgctgcagtggtcaacttgtagcacccctaagcttgcaggacatatgcttcaactggcatttcacaatcaacagtatgtggcagcttgagtcattgtgagcgcacttcctggaaatcaccagcatcccatatcccattgcaaggagctcagcactgctccttggataaccaaacctattcccaaatcccatctgtgtgcgtctatctcctggtacccttcctagcatcaattctgtatttgtaggagtccaatcaggagacacaaaccactcaaaagtttaaactagaatgagcaagatggctcacacctgtaatcccagaactctgggaggccaaggtgggtggactgctttgagctcaggagtttgagaacagtctgggaaacatggcgaaacctcgtctctacaaaaaacacaaaaatcagctgggtgtggtggcacttacctgtaatcccagctactcgggaggctgaggcaggagaattgcttgagcctggcaggtggaggctgcagtgagcagaggttgtgccactgtactccagcctgggtgacagtgtgagacccggtatcaaaaagaaaaaacatatatatatatatatatatatatatatatatatatatatatatgtaaatttaatataaaaagtattaattttggccaggcaaaatggctcatgcctgtaatcccagcactttgggaggccaaggcagacagatcacctgaggtcaggagttcgagaccagcctgaccagcacagagaaaccccatctctactaaaaatacaaaattagctgggcatggtggcacatgcctgtaatcccaactactcgggaggctgaggcaggagaattgcttgaacccagaaggtggaggttgcgctgagccgagatagcaccattgcactccagcctgggcaacaagagtgaaactccatctcaaaaaaaaaaaaaaaggtattaatttttacagaggatcagcacaatgagggacacactagcacaaagtaaagacaactctagagaatacggaactagcagaggccaggcattgtggctcatgcctgtaatcccagcaatttgggaagcctaggcaggaggatcgcttgaggccaggagttggagaccaatcagtgctaaatagtgagactctgtgtctaccaaaaaaaagagacattagccaggtgtggtggtggtgcacacccgtagttccagctacttgggagtctggggtgggagaaatcccttgagcctgggaagtctacactacagtgagccaagattgtgccactgcactccagcctgggtgacagagtgagaccctgtcttagaaagaaaaaagaaaagaaagtgttaatccccctatgggaatctcctcttctcctgccctctctggaacctcacttgtcagttcttcctcccactttcctgtatctttaacctatcccccacttttagctccttcccatcatcatttaaattactcaaacttcttctgttttaaaaacctctccctaaactcagggagaggtcttctgcacacacattgagccatctgctcttcctggtgccttctctacagcagcctgagccatgtctctaatctatgaatctcatcatgttactcccccatttacatcacttctccttgcctcagggattaagtccaaactccttaacagcccctgctctgccctgccttgcaaggcagcctcactgcttgcccctctccattacatctgctatggagtccaactgagcctcatctgccccttgaacgcacactctttctcctctgggagtctctgaagtgggtaatatcctctgcttataatatgcttccccttaaacctctactctcttcctagctagctttgactcctctgtcacttgtccgctttggcatcacctcctcatagaagacttctatgactcccgagattctcaggagcatggcaggtgaagtgctcctcccatgaatggatggagattaaggagtgtgtgttattcatgcttaattcaccagtgcttagctgagtacctggcataaaatagttactgtggtggccaaagtaataacccccaccgccaccaattgctcatgtcctatgttacacagcacaattacataggaagggggaattaagagtgcagataaaattaatgttgctcatcagctgaccttaaaacaagattatcctggagtatctaggagagcccatgtaattacaagcattctttaaaactggaagagggaggcagaaggttaagaaccagagacggtgggcacaatggctcatgcctgtaataccaatactttgggaggccagggtaggaaaatcccttgagtgcaggagttcaaggtcagccatggcaacatactgaggtcccatctctacaacaaaataaaaacaaaattcactgagtgtcacgatgcttacctgtagttccagctactgggaaggctgacatggtaggattgcttgagcctgggagtttgaggctataatgagccatgataggaccactgaactccatcctgagtgacagggcaaggtcctgtttctgaagaaaaaaaggacattggaatcagggccctctccatgctgaggtgcctacaaggcatctctctctgcaaatgagtaaacatcaccctccaactccttacagagtggagcaacaggaaaactccttcacctcatttctgtgctgcttgggaggcctggacagcccaataaccagctcctcactgatgaagcaatcaggaaatggctcgagttgagctaaggagaatttggatccttcctttggttctcagtaggcagggtaggggccaggcatggtggctcatacctgtaatccttgcactgtggggggccaaggtgagaggattgcttgaggccaggagctcaagaccagcctggacaacatagcaagacctgggtggcatacacctgtggtccctactacttggtaggatgaggtgggaggattgatcacttgatcccaggagtttcaggctgcagtgagccatgatcacaccactgcacttcagcctgggtgacagagccagaccatgtcacaaaaagttagaaaaaaaaaaaagagagggagagagactatacacaggcaccaccacatttggctaatttttaaatattctgtagagacaaggtcttgctaggttgcccaggctagtctaaaactcctggcatcaggctgggcatggtggctcatgcttgtaatcgcagcactttgggaagctaaggcaggcaaatcacctgaagtctggagttcgagaccagcctggccaacacggtgaaactctgactctatcaaaaatacaaaaatcagctgggcagtagtggcgtgtacctgtagtctcacctactcgggaggctgaggcaggagaatcacttgaacctgggaggtggaggttgcagtggaccccatcactgcactccacccctgggtgacagagcgagactgtcaaaaacaacaacaacaataacaaaaacaaaaacaacaacaacaaaaaaaactcctggcatcaagacatcttcctgtcttagcctcccaaagccctgggattatactgtttcctataattgaagacacttgttcttatactgctttaaggtataaaggaagaaaaaaaaaacagataatgacaaatgttggtgaaggccgggcatggtggcagcctgtaattccagaacttagggaggctgaggtgggcagatcacttgaggccaggagtatgagaccagcctgggcaacatggtaaaatcccaccactacagaaaaatctaaaaattagccaggcatggtggcgtacacctgtaattttcagctacccaggaggctgagatgagagaatcacttgtgcctgggaggtcacggctgcagtgaactgtgatggcatcattgcactgcggcctgagagacagagcaagcccctatctagaaaaaaaaaatgtcagtgaagatgtggaggaattggaacccacatacattactggtgggaacataaaattgtgtaaccattttgtttgggtatttcttttcttgtcattttaattggatttttaaaaaatcaagacggggtttcactatcttgcccaggctggtcttgaattcacgggctcaagccatcctcctagctgagcctcctgagtagccgggattacaggtgtgagccattgcacccaactggtatagccacgttagaaaacagtctggcagtttctcaaaaggctaaatgtacagtcatcctataatgcaacaatttcactcctaggcatatatcccagaaaaataaaaatatatgtccacacaaaaacttgtacaacaatcttcatagcagcattattcataatgaccaatacgtggaatacatggaaacaacccaaatatccaccaactgatgaacagataaacaaaatgcagtgtgtctctaccatggaatactgccatagaaggaatgaaatattgatacacactatgacataaaggaactttgaaaacactgtgctaagagggaaaaaaagccacaaaagatcacatattgtacaattctatttgtccagattaggcaaatctatagtgacaaaaaattaatcaatggttgcctaaggctgggggcaaaggtaggtggggagagtaggaggtagtagctaaggggtatggatttctctatagggtaatgaaaggttctaaaagtgactgtggtgatcgatgcacagctctgtgaatattctaaaacctactgaattgcagatttcaataaataaagtgaatggcatttgaatattttaataaagctattatttaaaataataataatagggggctgggcacaggtggtcatgcctgcctgtaatcccagcactttgggaggctgaggcaggaggatcacttgaggtcaggagttttgagcccagtcggagcaacatggcaagatcccgtctctatgataaaaaattagctggacatggtggcacatgtctgtagtcccagctacttgggagactgaagtgagagaaccacttgagcccaggagtttgaggctacagtgaaccatgatcatgtcactgtactgtagcctaagcaacagagcaagacgctgtctctgaaaaggaaagaaaacaaatgcaagtttttatcactttgtgagtgtagccaagttggaggagaaatagacaataataaaagagcactgaataatgacggtgagtggctggttaggctcagttgctagctaaatggcttctaaaaaattcaataaagttacagctctggggacagtcatgtagtcaaagaatgaaggcgaaattcattacaattgcccatggtctttatttacatgccttctagtgaaaaattcctaagtgcctaaacagcaagtctgcaatgatagcagctgtttattaaagactacaaaaaagaaatggaggccgggcgtggttgttcacatctgtactccttgaattttgggaggctgaggcaggcagattgcctgaggtcaggagctccagaggagcctggccaatatggtgaaatcccatctctactaaaaatacaaaaattagctgggtatggtggcgggcacctgtaatcccagctactcgggaggctgaggcaggagaattgcttggacccagaaggtgaaggttgcagtgagccaaaatcgcaccattgcactccagcctgggtgacaagagaaagactcttatcttaaaaaaaaaaagaaaaaaaagaaatggcatcttcttcaagaattacatcgtgtttcatgataaagaagctctaattttgcatttgttcaagtattgatgagatttacccaatatgacacccatcttggataaaatgcaaacaacacaatttcattttgtcattaacaaaaccgattaagtagtctaatataaattgcgatcttattaaaaactgatcagattaaaaaaattatggaattatggagccaataagatgttacaacctgttccaaggggaattccaaaatccacacatatctgagaccatcaagtatgatgaaatatatttgattactatattgaaaaataaactgattacatagccaacaattggacaggggtctcctcatccacagccacacaaacccgatcatgcagctatgtggttacaaggcctacatagcctagaagggactggtctgacttgagatttcatttgtatttgtattttgagacagggtcccactctgtcacccaggatggagtgcagtggtataatcatagctcactgcaaccttgaccaactgggctcaagagatgctccagcctcagctgcccccatacctgggaatacaggcaagtaccaccatgtcaggcatttttttcatttttgtagagagagaagacttgctatgttgcccaagctggcctcaaactcctagaatcaagagatctgcccatctcagccacatgagtaactggggccataggtacataccatcatgcctggctatatttattttattttattaaatttattttttttatttttgtagagaggaggtcttgctgtgttgcccaggctgctctcaaactcatggccttaaaacatactcccatctctgcctctcaaactgttggaactataggtgtgagccactgtacctggcctgacttgggatttcttttatctagcatcctttacttggtaggattgggaaaagcagtagtgttttttaaaattacttaataattcaatcagaatcaaactcaaccttgaccactgccttctctcacagctcacaaccagtctgtcaggaaatcctactgactgacttcaatatgtatccaggctctaaccatctctcaccaccaccatgaaccccgtcaggatcactatcatctcccaccgggatgttgccacagcttggcccccatgcttctacccaaatcttcccatagtctttctcaactcggcagccaggtcgtgcttttaaatcaggagacggatcatgtcgcctctctgctcagaagccctcggtggttcccattttagtcagagtaaaagccaaagccccagcaatagcgtcccagggcttacacgatctgtaccgatcccagcccagcaactccctggcctcctcgctgacttcgctccctctatctctttgctccactggcctccttccagagcctcagacacaccagagagtttcctcctaatgcctttatcctgttgactcagcctacaatgctcttccctcagcaccttggccagctccatcacctgcttcaaacttttgctcaatattcacttatgaggccaaccctgaccactctacttaacactgccatctgtccccattcccaccatgctcatttctttctttttgaaacaaggtcttgctttattgcccaggctggagtacactggtgcaatcacagctcacagcaacttcaacctcccaggcttaaacaatcctcccgcctcagccaccctaggaactgagactacagctgcatgccacaacacatggcttttttttttttttttgagacggagtctcggtcgcccaggctgaagtgtaagggtgcgatcttggctcactgcaatgtctgccttttgggttcaagtgattctctgcctcccaagtagctgggattacaggcacccaccaccacacctggctaatgtttgtatttttagtagagatggggttt[141 bp omitted]gttgcccaggctggtcttaagctcctgggcttaagcgatcctcccacctcagcctcctaaagttctgggattacaggcgtgagcaactgtaacatgaggtcccagcttcatgttcattttttgttgttgctacaacaaagtaccctacatttagtggcatcaaacaccacaaatctaccatcttacagttctgggggccagaagcccaactaggtctatcaaggctaaagtcaaggtgtcagagaggctgcattccttctgggggaggctctagacagaatgtgctcctttgccttttccagcttctagaagccacctccattccttgacttacctcgtgactccatattcaaggccagaagtgcagcatcttcaaatctccctctctgacctcttcttccattaccacatcactttctctaattctgactctcctacctcattctcttataaagatccttgtgattggtgggtatgggggctcccatctgtaatcccaacattttgggaggccaaagaggaaggattgcttgaggccaagagttagagatcagcctggggaaaataggaagatcctgcctttacaaaattaaaatcagctggacatggtgatgcatgcctgtagttccagctactggagaggctaaggtgggaggattgctttagcctaggaggtcaaggctgcagtgagctatgatcacatcactgcactccagcctcagtggcagagtgagactctgtctccgatataagaaaagaaatatacatttggtctctgcccgtggttcctggcatagagcttccaaagctcttataaagcccttcgtgacagaggtaataggagcattttctgttttgatatttagtcttagtcccaggttcctgacacaagggcctctaaggtctttcagatctgcagcatggtaagaatgcatgtgggatgctgttgagctaacagggtggctgcaagctccgagactgcttcaggaggagggctagctgccagagaaagcaaccacttttttttttttaaacggagtttggctcttgtagcccaggctggagtgcaatggcacaatctcagctcactacaacctccacctcccgggttcaagcaattctcctgcctcggcctcccgagtagctggaattatagggatgtgccacaacgcctagctaactgttgttatttttagtagaaatggggtttcaccatgttggtcaggctagtctcaaactcttgacctcaagtggtccatgtgcctcagccttccaaactgctaggattacaggagtgagccaccgcacctggccccaaccacattttttgaggcttggaactttcagcctcacctgctgaactccaggaggcaaaaggaactggagattgacttaactaccaatggccagtgattttatcaatcatgcctccataaacacccaaacagcagggtttggagagcttctgtgttgctaaacacaaggaggtcctgggagggtagtgtgcccaacagagggcatggaagctctgtgcccctccccacttaccttgtcctgtgcatctctttcattggctgttcctgagatggagccattacattgagccagtaatagaaaataaggtggccagatgcactggctcatgcccgtaatcccagcactttgggaggcagaggtgggcagaatcacttgagcctaggaatttgagaccaacctgggcaacataagaagaccccatctatacaaaaaataaaagaaattagccaaatgtggtggtgggaaccctgtaattccagctacttgagaggctgaagcaggagaatcacttgagccctggacgttgaggcttcaataagctatgattgcaccactgcacaccagcttggacaacagagcgaggccctgtctcttaaaaagaaaagaaaaaaaacttgtttttctaagttctgtgagttgttctagtaaataattaaactcaacaagagggtcatgggaaaccctgatttctaactggttggtcaaaatacaggtgacaacctaggacttgcaactggcatctgaagtgagggtggtcttgtgggactgagcccctaacctgtgggttctgtgctaactctaggtagtgtcagaatggaattgtgggatacgcggttggtatccagagagttggagaactggtgtagaaactctgcacacacatttggtcagaagtctgtgagtagagagaaacgtgttgcaggaagtcagggaccccaaacggagggactggctgaagccacagcagaagaacataaattgtgaagatttcatggacatttattagttccccaaattaatacttctataatttcttaggcctgtcattactgcaatctctgaacataaattgtgaagatttcatggacacttatcacttccccaatcaatacccttgtgattttctatgcctgtctttaatctcttaatccggtcatcttcgtaagctgaggatgaatgtccccgcaggaccctgtgataattgcgttaactgcacaagttgtttaaacaatatgaaacctgggcaccttgaaaaaagaacaggataacagcaatttcagggaacaagggagataaccttaaactctggctgcctgtgggccgggttgaacagagccatatttctcttctttcaaaagcaaataggagaagtattgctgaattctttttctcagcaaagaacatccctgagaaagagaatgcatccctaaggggaggcctctgaaatggccgctttggggacggctgtcttttacagtcgtagataagggatgaaataagccctgggttcacgtggcgctcccaggcttatcaggacaaggaaattcccgcctaataaatgttggtcagatgggttgtctgctctcaaaccctttctcctgataagatgttatcaatgacaatgcgcgcccgaaacttcattagcaattttaatttcgccccggtcctgtggtcctgtgatcttgccctgcctccatttgccttgtgatattttattaccttgtgaagcatgtgatctctgtgacccacaccctattcgtacactccctcaccttttgaaaatcactaataaaaacttgttggttttgcggcttggggggcatcacggaacctgccgacgtgtgatgtctcccctggacatccagctttaaaatttctctcttttgtactctttccctttatttctcagactggctgacactcagggaaaatagaaaagaacctacatgaaatatcaggggtgaatttcccccgatatcacactggctcttctctcacctgtctacctgcttaacttaataggagaggcaatgcatggtgctcatgaacaaggcaagcattaaagtcagaccagactaacatttgactcagtcctaatattcaggtgagcttgggcaaatcactcattaaccccaagtcttcatcattttgtgcatataatggggataactgtggcacccacctgtttttgtgagaatcaatgaaatattatgcttgatgttattgtgatcatgatactatctgacaagggcagtgatgcatgataacatcaaaaaattagaaactgtaatgaggtctcttgggcaaaattccatacaagcaaattactgtctctacaaagcatttctgccacacttaattcaccattccctgaacaaaatgtgccatcttcattgttcaggtctgtatagtgctggtttccctgcctgggcagctcactccatcccatcccagcccaatccccatccctccacctcccccttccctccccactctcatacaactcttccttatcttacaggacttggcttcaatgtcaccttaactggaagcttctctccctctccagaagagcttccgattgcacttgatgcatgcactattatttgatcatttttgagttacagtccaagtctttttgtacctgaataacatgttgcccagtcagtttctcttcctggattcagaagtctttcatggtaggtccagctagaagtgacaaaaagacatttaaaaaaaaaaaaaaagagggatgacacagacagacatcagcacttagaagttttaaacgatatgtgaaaaacaaaatttaagggcttctaggagaaatgtaggagggaaggtgttactgggaaatatgatagaaggttaatttttattttattttatttttagagaaagggtcttgctctatcacctaggctggactgcagtggtgcaatcacagttaactgcagcctcaacctccagggcttgagcaatattcccatctaatttttattttgtttaagaaatgcagtcttgctcttagcaaagctaaagtgcaatggtgtgatcatagcttactgcagcctcaaccttctagactcaagtgatcctccagtcttagcctccccagtagctcggactacaggtgtgcactgcaacgtgtagctcattttttttttttaatttttagtagagacaaagtgtcactatgttgaccaggttggtggtgatctcctacactcaggcagttctctcacctcagccttccaaaatgctgggattacaggtgtgagctgccacacctggctgagggggttaatttttaattatataaagagctcaaagcaaatattagaaggagcctaaatgcctccagcagttgactggtactggtaaattgtgatacatccatataataaaatattatgcaaccatgaaaaggattaagatagatcaataggtattggcacaaatgtccacgaaatatgaaaatatgaagtgatgttcaatcaccatgtacgtatcttgaaggatatggcccattttctcaactgcaattatttcctgagataagattatgggtctaaagagtgaaggacatttttcacttatttaaaagtatttatcatttttataatttaataaaagattaaacagatcattgaattagtaaaagacaaagtaactctataaataaatggaaaagacacagataccccaggcatggtggctcatgcttataataccagtactttgggagggggtggtggggggattgcttgaggccaggagttccagaccagcctaagaaacaaagcaagacctcctctctagtaaaaataaaaaaataaaaataattggccaggcatagtggcatgtgcctacagtcccaactactgaggtggaaggatcacctgagcctaggaggtcaaggctgcagtgagttgagactgtgccactacactgaagcctaggagacagagcgagacttcatctcaaaaaaaaaaaaaaggacaataaagaaataaagctaataagctaacataaggaaagataaaatatgtgacaaataggctgggcacatggctcacagctgtaatcaagcactttgggaggccaaggcgggtagatcatgagatcaggagttcgagaccagcctgatcaacatggtgaaaccacgtttctactaaaaatacaaaaattaaccaggcatggtggcatatgcctgtaatcccagctaataggaggtctttcatttatcacacagaaaataacttgttaaattataatacctgtgtgggcgaaggtgcagtgaaatggccattttcttgtagtattagtggtgtttaaaatgtatataagccttccagcataaagcttggaaattttttttaaatcatacagacagtgactcattatactgcctcctccaactcctggcctcaagcaatcctcccacctcagcctcccaaagtgctggaattacaggctgacagccaccatgcctgaaagctttgcaatttacatcgagggtaataagaatgctcatgccctgtgactcacagtaatctcacttctggaaatttcacctttggatataattcaacctaaacaaaaggtcatatgcacaaacacagtgaaaatctgggagtaatttttttctctttttttaaaaaaatatggaatgcttcacaaatttgcatgtcattctttcacagaggccgtgccaatctctctattgttccaacttaagtatgtgtgctactgaggcaagcatgagtaatttaagatagggtggttaagtgaaataaggaagaattatggagaatttaaaaatctatgctatttataggcacctagtaacagctcagtaaatattagctgctactattattatttttatggtaatttcactcaattaaaaactgtcgttaaaaattaccattgtcatggaacataatgtctcctactgtataattgtagaaacagatacaatttgtcccttggtatatggggggattagttccagctctcccatttctgtgtataccaaaatccacgcatactcaagttttcgaagtcagtcctgtggaatccacatataacacaaatgggaaaattagtgaggtgtggtgacaagcacctgtagtcccagctacttgtgaggctgaggcaggaggattgcttgagcccaggaggttgaggctgcagtgagccataattgcaccactgcactccagtctgggcaacagagtgagacagaaggttgactttttaatagaatttttctgttcacttgaagatatggtcaggattgtggcatatgaaaattcttcataaaataactatctaatccaattaatgctggaattgggaacagcagaagtgtcatctcacagctactcgcaatgaaaggtgatgtctggggctcaggtgtgttgaggtccccatgccgggactatgggtgctgagtgggatttacttgtccatccattttctatattccagcactgggaaactagggacagtacttgttctcaagggaatcttcagcttaggtggctctgtaaaagagaaattacatcattgaaaaatcgtcgcaggtcaggtgaggtggctcatacctataatcccagcccactgggagactaaggcaggaggattccgtgaggccaggagttcaagaccagcctgagcaacacagtgaaacctcatctctacaaaaaattagaaaatgaactgggtgcggtaaaacattcgtatagtcccagctactctggaggctgaaataggaggatcgcttgagcccaggaagtggaagctgcagtgagctctgatctcaccactgcactctagccttggtgacagagtgagaccctgtcttaagacacacacaaacacacacacacacacacacacacacccaatctcactctgtccagccttgactaatcaaaagggccttctggttacagaagaggtatgctcttttgtaggacagggagagaccagcaagcttgttcacagacttttcctcatcctctgcttagttttccaagaaccctcacagtggaaatggagtctctgggaaaatgacctaaatctttgggttaccaggggagaaatatgcctcctttgtcaattaataaatggaacatctgccttaaaatccagggagttctgctagaatgaatcactccctaagaccc[217 bp omitted]gaggcaggaaaatcgcttgaacctggaaggcggaggttgcagttacttctagaagaatttccattagccctttgaaatccttcaacattcatgaaggccaaagagttttcacctaatttaatctgatgggtatgtgaccagagtctttctagggaatagagactcccaaacagttcgactgggaagtgaggagagaatttattactcaaaaccaaagggaaatgaaaagaggccaacatagaatgtcattattctttcttggtggggaatggattccagagtcattctgtgacctttacatgacctccttattagcatctaaaagcttccagtgtaggatgcagccagctaggttctcttctaatgtaataaaatttgcttcagcaaatcttatgcagagccatctccaggctccagaaacaataggctataaattactggatctcccatttgatacaatgaagtatgagcatggtcctgaatgactcctctacatactactctgggtggcttgaagtgaatttgatacaagaactggagcgagggcaaagcagagctagatctaggattaatgtgcttgggcccagctcctcactactcacctataagtctagttccagaacccaagtagaggatggggaaacaaggctcctgactttttttccctaatgtctgcatctctttcacatttcttatctccttgcaaagaaactaaacaggctcaactgaaataactaaatgattaaaccctatacagagactctccaaagactgacaaaatatcattcaagactgttacacagacaaccttgaggatgacttgatgtaccagtgatctacaatatttgggatcattccaaattcccatcaaggatctgcctatatcaacaaaggagccaaggaccaaccattcaaatgggccctgctgccaagcctttttttttttttttaacaatgccatctcttcatattgttccatttaacaaaactgcagcccttcatctatccttaagtcccttggccaatggtacagggccagagtatgctactccctagcaggaaatcaacaggatgacctactaaacaccattcagaagatgctaagacccatgaattgcaacaggaaagaaaagacagagaattagtcagacaggtacatgctgtgccaaaaatgcactacagcccccacccaattctgcctaatcctagctgggctgacaccaacctgatgagacaggcctataagatctcaaactaaaacagaaactcctgaactgggttctttcgagcccaggaagcagcagtaaatcattaaagaacagataagttcttaaggtgagggagagtttcagataaatggaatgctggtagaacacagggcccaaaggagcaaaagttaacctaagcccaggtagaaccttgtttactagagtattaggcatgggtttgggcaactattctaaccagagaaactggcttcagtgagggcaagttggcaatccaaggtatagcatgcatagggctggcaaaattcagggtgactgaagcaaaagcttcataaccagaaagaccacatctgggggtagagcacaaaactctcaagagatgaatctttgtaagagtgaggcagaactatatagcagttttaggagatctgttggtgcccagcaagagctccaaacgggctatatgcagggatgcaggctgtagtctcaggagaggaggttcacaaaagtcattcagtccaagacctcaaactgcgttctctactaaaaggaatcaaggttccctagagaaacggctgactccatgtatggtgcagtatattgatcctggaacatctgttttgccagaaagcaagaaagccatcaaagtccaacaggatcacgtcaaaaagacatgaaagtcaacttgaagagataattattaacctagatgagacaatgtaagcatccaaaacaataaagactgcaatggcctgaaatacatcaaatgcaaacaataatctatgagttcataatggtattcagaaaaaaaaactactggtcattagagggaaggttactaggtcactaacttactactctgaaaagtgacttaagatgagaggtagggtggagaattagctatttattcagtctttcctgtacaaacataaatttttagggagattgaagcagatgaaacaaatctggaaaaatggaggtaactgcttaatctgcgggttgggtgcatggaggttcaacatatttcttttgtgtatatttgaaccccctacaaaaaaagcacaagacagaatgtgagccaagcagcttagggtttaggcaaggcttctgcctacaagagacactaggatatgaggggtagttttagccctaatgggctgagccaactggaggtatatagggaagtgctaaattgcagaggtatcatgttgcccagcacttgatcaaatcctagatcctaggtctgcttggtggcatgcttcctaagtagtggatctgaggctacctatagaacttcctttgcagtcatagttcgctcagaaactacaaaagtgcttgctcttgaaaatggagtctttgtccatttcatgcttctataaaagaataccacagactgcataatttataaaaaggaaaaaaggaaggaaagaaaaaaggaagggaggagggaaggagggaaaaagggaaggagggaaggaaaggaaggaagggaaagaaggaaaggaaggaagggaaagagagaaagagggaaggaggaagggagggaaggagggagggagggagagagagagggagggaggggaagggaagaaaagggaagagaagggaaaggaggaagaaaaggaaaggaaaggaataaattttatttcttaacagttctggatgttaggaagtccaaggttgaggggcctgcatctggtaagggtcttcttgctgcatcatcccactacagaaggcagaaggaaaagagagtgcaagaaagcaagagggcaaaaggggctgaactctgttttataataagcccactctgtgattactaatctattaccacaataacaacattaactcattcatgaaggctattttattaggccccacatcccaactgttgcattgaggattgagtttccagcacataaactttgggggacacatttaaaccatagcagagcacttaggttaattcaactaagaggagctgggaaaatcaaaggcatgagaaagacagcaaaagctagcagagagaaatgcataggttaaggaaaaaagtcacagtgaatcctgtagtgcaggctactttatcaaaagcacctaaaaaagatctcattaactcccccagctcacctccacgcacatctaaagagccacacacagcaccaccaaaggcagcacaatgagaacagcattctcctcaacagacaagctgggagtatctagacacccgacctcaatagctccagaacagccctaaaacatttcctccctaaccaccactcaagtcaccagcttggaaagtattaagaaaacccaaatcctgacacaccactatgaaacaacttaaaacagcaaagaacaacccatttaaacagcaatgccagctgttggggaaaaaaggaacaatgagtagaggagaaacagaccactcggggtccaccaagacccagtctctcagcttcagcacttttaaatgcagaatccatatccctctggggcctgtggagctccacaaggcatgtcgtcctcaaagataaatgagcacgcaagctggctagaaaaccactaagggtatttattctttaaagaatctttacagggtcaaagaagaatgggtcctaactggctatgtgaactccccacagattctgaggatgatgtcagtatccctttccagatgtgtttaacactttgcagtcacttgtattcctgccactgagtgccagtgctttgctaatttgaactgattccagctcacgctgaccccagctccctggatgttaccattagccaagactgtcacccatactgtaccctttcaaagagtcctaaaaacagctcttcacctactcttccaagacaagtaaaaatgactgccaaagaaatggggaaaaaagattcagagagtgaaaacaattaatatactaacaagagagcaaaaagcaaagggggaggagaaactaggaaaatcatatatgggctctcacctatttccaaagctgggctaatgtccttttgcttgtgtctgaataaggcaccaattttaagctgctaatgaaa[144 bp omitted]tctactaaaaatacaaaaaattagccaggcatggtggcgcatgcctgtaaatccagctactaaggaggctgaggcaggagaattgcttgaacctggaaggcagagaatgtggtgacctgagatcacgtcattgccctcaagccacagcaatgagaacaaaattcggtaaaaacaaaacaaaacaaaacaaaaccaccataaaataactcagacttaattaaatacaaccctagtggtgaatgactaaaaatggattactcataacagagataacggtccaataagaatccaggaatcttaccttttaataacaaaaaaatcctttccttctaaagtaacatcctctcaaggccaggaattccattagtagaaagccttcctaaaaaacaaaattcctggccaggcatgggttcacgtctgtaatctcagcactctgggaggccgaggcgggaagatcacttgatatcaggagtcgaggcgggaagatcacttgacgtcaggagttcgagactggcccggccaacatggtgaaaccgcatctccactaaaaatacaaaaattagcctggtgtggtggtgggcacctgtaatcccagtgacttgggaggctaaggcaggagaatttcttgaacccaggaggcagaggttgcagtgaccagcaaggttgtgccattgcaccccagcctgggcgataagagtgaaaactccatctcaaaaaaaaaaaaaaaaaaaaaattcctttgggaaggccttctacataaaaatcttcaacatgagactggaaaaaagggtatgggatcatcaccggacctttggcttttacagctcgagctataagaacaaaaagaaaaagggatatcatttaaacacagtatgtagaaaagaataattattgaatctgtattggtctttaacttttacactttgatctttaattctgttattgtgattgagtccaaagaaaaacagtatgagtaaaataaaaagaacaccaaaaatgctaatattctgtttaccgaagtctgtagtgaaatatcccattaaatccaagtgcagtgacacatccataatcccaagcactttgggaggctgaggcgggtgaatctcctgaagtcaggagttcaaggccagcctggccaacatggtgaaaccccaactctactacaaatacaaaaattaggcaggcgtggtggcagaggcctgtaatcccagctacttaggaggctgaggcagggagaattgcttgaacccaggaggtgagcttgccatgagctgagatcataccactgcactccagcgtgggtgacagaacaaaacttcaacctccaaaaaaaaaaaaaaaaaaaaaaacagctagcaggtgacatttgctatagggagactagggatatgatcttgctgcaatccttccattttagtaaatctaaacaagtgtgaatccattctgtttcgtccccactccactccagagccaaaacaagaaaatcaattatatttctagttctttaaaaacatatctaactaaatcatctaattaaaagataatatgcatggttccatactctaaaagaaaacttatgtcctgcatatcatggacatttgatgaatgcttattcagttgactggtgtagacttcaataataacctgttcaatgcattatgccagatgaatcttgcatctcaaaagtagaacaaatattgttctttcagttttgtctacccataaatgcaatatttactaataaaaagaaaatgagtttattgttctagagagtatgagaattttgacaacatgaattctcctgtcctaggacataattaatacttagaggcatactatttcatgtggaagctaccattaaatcaatgttaagtgttaattacctcacataatcttctaatctgacttgactgaagacgtacctgacaaagttgatttatcaagttgtaaatcttcacctattgaattcataagttcatgtctgaaaggtgagaataaatacttaatattcactaggcaatattcagcaaagtaatatccactagtacacatttaatatttcatcatgaactgcgggtgtgaagagaaaagacaggctgggcacagtggctcacacctgtaatcccagcagtttgggaggccgaggcaggcagatcatgaggtcaggagttcgagaccagcctggccaacatggtaaaaccccgtctgtactaaaagtacaataattagctgggcatggtggcaggcacctgtaatcccagctactcgggaggctgaggcaggagaattgcctgaacccaggaggtggaggttgcagaaaccattatcacgccactgcattccagcctgggcaagagagcaagattctgtctccatcaatcaatcaataaaaatataaggaggaagcatttactgtgtatttatatgtctggtattatgtgaagcactttactatcttatcaaatcttcgggacagatcttcagttctcatgaccacaaaagaggatactaaagctcagacaggagaagagacgtggccagcctgtgtccccagggcctatggtcttaccactaggttacagtgtttccagataccacatgttgtgagatttttgccttaaaatgaaccaaaaaaaaaccaaaggtgaaaaaggcataagctattaaaaagtgggagaaacactaagagaaccttaagcatgtaactaaaaatattatggaaatgttattgaattcattagcaaatttagtgctaggttttcattgaggagtaggttatattactcatgatgaagaaaaatgttccttttaagtatattaacataaatgccatcaatattgtttatcatgtttaaatgttcacttaaagcaattcagttaaaattctgcatatcatacaattttatagtttgctagtaggttacaagtaaatagtcacccaaataaaaacatcatgttttccactggttgttgctcttttttaggtgagtatttgatgtataccaacagagagaggataataacaaatcgctaatttctttcatcactatataaaggtggcttcaggatagaatagtatcagggcaatgatgaatttgaaatctaacatcaattcagtgatgcatcaagataaaagcagagacaacaggggcaccttgctgagtactgaacattttatttatttacttatttattttgagatggagttttgctctttttgcccaggctagagtgcaatggtgccaacctcgcctcactgcaacctctgcctcctgggttcaagcgattctcctgccttggcctcccgaatagctgggattacagacatgcgccaccacacccgtctaattttgtatttttagtagagacggggtttctccatgttggtcaggctggtctcgaactcccgacctagatatctgcctgccttggcctcccaaagtgctgggattacaggtgtgagccaccgcgcccagatgaattccaaatttaacaaagcagactaagagaaacaattcatttaaaaaaataatatttggccaggcatggtggctcacacctataatcccagcactttgggaggctga[131 bp omitted]gaggcagagaactgcttgaacccgggaggcggaggttgcagtgagccgagatcgtgccactgcactccagcctgggcgacagagtgaggctccgtctcaaaaaaaataaataaataattcaatgaaattcctaagatccagggctttgcaataaatatgtaaataaatttccaatctccatactgaaagtttaaaagaaatgctaactaataactaaagaaatacaacttttcctcagctttgcagcaatctagaaacaaagtgtgtagacactacaaagcaccttacaaggagaaacatgtaaggatggcatgactcgccggcagccctgggcttgtccacggtacccccatgatgaacagtaactccactgtgtaaacgcccatgaacataagattacaagacttttccagtttagacataccatattttctttcagacaattcttcagtttgtttacgtagatcagcgatacgatgattccatttctctgaaaaccaagcaaaagttgcttctcaataacacgtccctatgtcagagcagcactaacgtataatgactgatgtcatatattttacattctaacagtccatatcattttactgctttcaagaaaaaatttccccttcttggtggttcttagaattggtttaatgggagactattagagaagctgaaaagcaggagggcagaaaagttcaatcaaattaaacacaataacagggaggtcacaatgaggcggtctccaggggtcttttagcaaacttcctaaaacatgtctcagctgtgtgaaataagactttacagcagccgggtgcagtggtgcaggcctgtaatcccagcactttggcagcagaggcaggcggatcactttgagctcagggcaacatagccaaaacccccctccctagccccacccccaccccgtccctaccaaaaatacaaaacagcagggcatggtggcgggcgcctgtagtcccagctactcaggaggctgaggcaggagaatcacctgaacccaggaggcagacattgcagtgagccaagatcacgccactgccagcctggatgacagagcaagactccacctcaaaaaaaacaaaaacaaaaacacaaggttaagagggacccccgaccttacagatacaagtttaagagggacccctaagcaaaaaatgccaaccctttttctcccaatcattgaaacaccaggagggtgtaacagttttgcagcctagctgtagcaggctgatgcccccaagatgcccatatcctaatcccgggaactggtgaacatgaccttatatggcaaaaggagctttgcagatataatgaagttaagggtctttggcttttggggttgatgtactcactcggatccttgtaagagcagagcaggtgatggagagggtgggaggtgtagtgacagaagcaggaaactccagtcattcgagacgggcagcacaggctgaggagtgcaggccacctctacggccaggaaacagattctcccgcagagcctcggaagctaccgaccctgctcccaccttgactcagtaggacttactgtagaattctggccttcagacctgtaagggaatacattttggttgttttaagtcactaagtgtgtggtaatttgttgcagcagccacaggaaactagta[131 bp omitted]gtgaaatgccatctatacaaaaaatacaaaaactagccgggcatggtggcacatgcctgtaatctcagctactcaggaggctgagacaggagaattgtttgaacccaggggggcagaggttgcagtgaactgagattccaccactgcactccagcctgggtgacagagcgacgctccatctcgaaaacaaaacaaaacaaaaaaaccccacctgaaggtttccagttctgccagcactctcccacccaacccccagaaacagacattccattgctgtgggccatggacaggcagaaggaagcacctcctcatggcagaggcctacccaggagaaacccaagggaaggcactgctgggctggccctctctgccaaggccatattctttttttttttttttttgaggccagtttcactctgtctcccagactggagtgcaggggcacaatctcggctcacttcgacctctgcctccccagttcaagtgattctcctgcctcagtctcctgagtagctgggatgacaggagtgtagcatgcctagctaatttttgtatttctagtagagatgcggttttgccatgttgcccaggctggactcgaactccttgcctcaagcagtccacctgtctcagccccgcaaagtgctggtattacaggagtgagccactgcacccagcatttgccaagacctttgatggcaggctttttccaggtgatcagtccttgtctggtctggctctgccccactctccttctcacctagttggaatccctagctacttttcagtagaggagagtgtgtaccccaatcccagcttggttcagatctgcatttaagtcatggaacctggctgctccccaggtcctgaagaaaaaaacggtctctctgtgggtatgataaaggatgggcctgtccccaggaccctgtgagagggaagcccaatgtcccaccaggttggcagggctggggaagggaaagtgttatggcagccccaagaaaaaaaagaggcagcagagggagcaggacagcgctcacatggaactcatgccactgcctgaggggagggaggagtgcacgccagtgacgtcagggggcagagaggcgcagttccagggcggctttccccctcacttcctgccatgttactctgatcgcctccaggtgagcctgcccactttgtgcccaggggcctgtagaaaaccacagctccccatggttatggccccaggagtggggcagagcagggaggagtcctggacagaggagaggaaggggcaggagggagtgggcctcaaactccaggagggggcccttctcatgggtcctgctttctggcttctccttccttacccctgggctgatcacttggggaagaactgagacaaagtttctcaccctcaggcccaaagggtttaattactgggcccttagggaggtgtgagccccctgaaaggatgcaaggtttggttttgttttgttttttgagacagagtttcgctcctgtcgcccaggctggagtgcaatggcgtgatctcaccacactacaacctgcgcctcccaggttcaagtgattctcctgcctcagcctctggagtagctgggattacaggtggctgccaccacgcctggctaattttttgtatttttagtagagacagggtttcgccatgttgggcaggctggtcttgaactcctgacctcaggtgatccgactggctccgcctcccaaagttctgggatcacatcagccactgtgcttggccacgatgaaaggttttgtgtggagagcatgtacatgcctttctgggaaaacagtccacagctcttattctcagcaggcttcacggtgaaaaaaggttagaactcttgctacagagctgtggaagcagccaggtgaggggcctgccaagggcactctgggcactacctgggcactctcgagcccatcatcccctaggcaggctgcactgcttggtatttgcagagctgagggggtggggcatgtggggactgtgaaatcgccctgagatgacccacagtcctcagctgggaagtgagcgctgcatctcctgcagcgtcctccatccctacagccatggggccaggagaaccggcccttgcagcaagtgagaagcctattattgattccctccctagccatgtagacagtgaaccaagacactcatatcaggtaaatgccttgttctctgttaccaaggtaaccagtaggcattcccagatacagcgaaggtcctcacaccaagatatgcacctggccacctgaggaaagagaaaggactatctgaggggatggggctgagctgggtgtggagtggtccttgtgggtcttggagagtgggagggggagcagcatgagccaggcctcaaggcagaaggacaaccaggagacagcctggaaaaagtgctggacccacaagggctctaggctggccagaggggaggtgggataggctgtaaagtcctgaggtctgaagattggccctggcaggaagaaaccaggtaaggtggggtgttacctacaccctcggggccagatgcaggccagagccagccaattaccaggcccttagggaggtgtgagccccttgaaatgatgcaaggttttttgtttttgttttggagacggagtttcgctcttgtcacacaggctggcacctttgcccagagcaggcaccaagacttcttgctctgggtgtgacctcagtctgggtaaaagccccagcccccaccagcaccacctaccccctagactacttcaggtgctgagcccaagccaggggcaggaagctaaactgatgcctagggtaatcccaacaaagtccctggttccccgcagctatggggctgatggggaattacagcccaaaccccagatgctggctctcaaactaacactgagccctcagtgcccacagggagatacaatcagcacactttccagatggggaaatgggatcagagaagtgcaacagccttgcccaatgccccagaccagggctccaggcccagagtgttcttttgtcactgtgttcagagggcagcagctgctgtgatgtacccacctgagcctggcagctttctccaactttggaagcccaggagcatggcccctgtccacagatgcacctggcacgaggcgtgcccagagggacagaggcagatgagttgcgtctcctccactggattgtgagggcctagaaggagacaagggtctgcttgagaaggcagtgaacagcgagcagcctgaggcagtgcccctctggatggatgtgcagtgcctggatggaacctggctcagacagagctcagttctgcaggtccctgaggcatggagagttcacagctaccaagtgtaggagtctggattcaaagccaacggcgtcactccaaagtccctgccctagcccctggaccacccttgcaggcccatcagatgctcaggccagcagcacagccggccaagaccagggaaacttggggagcctcagagcacccccaggtattccaacctaaccctggtgccccgcctctcaccgcccttcttcctgcttaacctcaacccctacacaaagcctgggccacttcatgtggcatcaaacagacgcctcaataaatcagtctaatctcgaaaaaaaaaagacttaacagatatacaattgcacgttaaaatgctaaagaccataaacatataacaacttaaagtacatataaattcaatatatatccaatcattgtaactatgacacggtagaatattaaaatactattttcaaaatgtatacaagcttaatgttctatgtattcaaactatttattcaaaatacaaatcatcaacataaattgccactaatattcagtcccttcacaggacatgattcactgggagttaataaattagcagctggcaggcagtgacacaccgcaaaaatgaaaaccaagaggtgaaatagttctgaaataaaggttttaaagctaacagaaatcactgaattactaagtcattagcactaattttgagccaactaactaattaatatgagatgatacaatgtcctatactttggtaaatacagactatgtttaaacaatgtctgtaacgtgacttgtaaaatgctcctggctttacaaagatgtgattaagatgtagtaacacatgctaaaccatttccccctgcagagcatgtggtaactttcatcagtcacattgagagtccagaagataaaggaaaaggtcatggattttgctgagaacttaccagagttgaactccctcattttccgttccccagcattggcgggttctgggactggtggctgtggcggctcgttggtctttgtctcttagaaggtggggaataatcatcatcttgaaaaagaaaaaatggtcattactgaaggaaccatcttaggttacagccacctctgggtcaattcccaacattcaaaagctgagcagggctttaaagctatcttattaataattatttctgtattgcgaacttcagcatacttttttctagttacatttgaaatgttattcttttgggatgtgctcaagtgagtactgctttttcctctgccttgcttcattactttttagtttccttcatttgaatcatcattgtaagtctccccttctcctcaaataactttcaaattgctgccaagaactatgttctatcttaaggcttttgagaaaaaactttcaatgaagatagccgcctaaagttatacaaatatagaagaaacgggataaaataaagcttagattggaaaaaatatttaagattctacaaaattcacgcgtaaacaagggaagctgagtaattgtatgttcaaatacttttaacaagtgcaaaacatgtaggcttaaagaaatagagctggccaggcatggtggttcacgcctgtaattccaacagtttgggaggccgaggcaggcagataacttgaggtcaggaattcgagaccagcctggccaacagagtgaaaccctctctctactaaaaatacaaaaattaggccaggagtgatggctcatgcctgtgatcccagcactttgaaaggccgaggcgggtagatcacctgaggtcaggagtttgagaccagcctaaccaacatagggaaaccccgtctctactaaaactacaacattagccgggtgtggtggcacatgcctgtaatcccagctactcagaaggctgaggcaggagaatcccttgaacccaaaaggcaaagattgtggtgagccgagattgtgccattgcactccagcctgggcaaaaacagcgaaactccgtctcaaaaaaaaaaaaaaaagaaaaaattagccaggagtggtggcgcatgcctgtaatcccagctacttgggaggctgaggcaggagaatcgcttgaacccaggaggctgaagttgcggtgagctgagaccgcaccattgcacgccagcctgggtagcagagcaagaccctgtctcaaaaaaaaaaaaaaaaaaaaaaagagagagagaaagaaagagggctacattatttatgaaacagatactgttaactcagtcaccagaaagcctgtgtataaatgagcagtgagatattcaagcacagcacacacacacttctcaggacagctgtcgtgagagttccatgctcatttccttctgggtacatcagcaactcactctgctatgatcctgcaatacatctcatgttagaattagagacatctgggccaggcacagtggctgacgcctgtaatcctaacactttgggaagccgaggcaggcagatcacctaagttcaggagttcgagaccagcctagccaacatggtgaaatgctgtctctaccaaaaatacaaaaaattagctgggtatggtggcgcacgcctgtaatcccagctactcgggagcctgaggcaggagaatcgcttgaacccgggaggtggaggttgcagtgagccgagatcgtgccactgcactccagcatgggggacggagaaaggctctgtcaaaaaaaaaaaaaaaaaaacagaaaaagaaaaagaaaaagaaaaaagaattagagacatctggatcaaatcagctgccagtctcgcaaagtgtcgggtaatatcctattaagattgctgcttacacatcatctataaaatactgaaaatatcattttaagaaatcttttttttattttgagacagagttttgctcgttgcccaggctggagtgcaatggtgcgatctcagctcactgcaatctctgccccctgggttcaagcaattctccttcctcagcctcctgagtagctgggattacaggcatgcaccaccacgcctggctaattttgtattttcagttgagacagggtttctccatattggtcaggctggtctcgaactcctgacctcaggtgatccactgaccttggcctcccaaagtgctgggattacaggtgtgagccaccatgcctagccaagaaacccttattttaaaacaagccaggcgcggtggctcatgcctataatcccagcactttgggaagccaaggcgggtggatcacttgatgtcagtagtttgagaccagcctgggcaacatgttgtaaccccatctctactaaaaatatattttaaaaattagctgggcatggtggtgggcacctgtaatcccagcttctcaggaggctgaggcaggagaaccacttgaacctgggaggtggaggttgcagtgaacggagatcacgccactgcactctagcctgggtgacaatagaaagactccatctcaaaaacaaaacaaaacaaaacaaaacaaaaaaccactaaaaaaaagactccatttcaaaaacaaaactaaaaccaaaaacacaacacaaatgtagtacacaaatgaaaataattactgtgttaaacacagcttcatagaaaataaaagaccaatcaaatacaataagctgcctttttagatgggtatgttattcttctttcacagctaaagaaacaggctcagagaatgttatttgattggaccgtgttgcatttctggacagtgcagctgagatcagactttgtgtgtaactccactagcctaccagggtgcctctcatgaaggtaagaaatgtaaatctggcctaatatacaaagttgccagggcagcactgggtcaattctacatacagtacttctatgttcatcaagggaaatcttaagggaaagtgaaaatgcttctagaaggcgactggacaccagcgcctttgcttgttgcctttgggctcttcttctaaggccaacagtgacctgaaattattgactggcttttccaatcaagtggacaaaatggtaccaaggtcgccaacatcgatgtagaacatcgatgttctacaacattgcttaacgcaaggggagacgctcctgactcagagtgtttaattgctcacctacttctttttctgccctcttgggcttctgaaatgaaaagaaccctggggtgatacagtgagtcaaaggggtgccagccgcatcacagcaaaacagattcctaaaaaatccctggcctaagatgacagccttggctggatcagtttgaatgtgctgatagtggacatggtagaatgaaggtggttgaaatgttcatattaaagaacttccacccagattgcaagaaaagagagaggaatggagatggcagcacgagcccctacaataaaagcagatgttttgagatcagttatatttcttctgacaaaaattaaagatagaaaccaaagtttagcctgagactacaattaattgggcaataagccagaggcacatatggcatagacagatttaaacatttctccctgatattaatacaaacactaaaattacaaatgcatggattccaaataaaacaaatatttaaaaaatttaatgaataaacactggggtctacagtagtatttgaaggagatctcacaaacaggtttggtttttgaaggttagaactggtggtctagagaattcatttcattccagagaaagaaagagaggaatttcttgggttccttcaggaatgcatctagctttgcctcatctttgtttgaactatggatacggcagaagaaaacatgaggatttcacagatttaaggtacaaaaagtcactgggttctctaagaagtctgggattcttctgctggaaaaataagtttgttgagaaaaaatgagttggaggaagctgttattgaagtcaagcagaattgtttttactaatctgcttattacccactctgtagtgtggaaacaaattattcatgcacaaggtcctcttactgttcctagaatgcagtggaaagagaacagattagttttcctccctcagaacacaatccctagaaacaacctacctcagatgagatattgcctaattattttcaaaagacagtgaaacatcatggatgtaaatgtttgctgcaaaataaatacatgctagaaacagaagcatctgggtcacagctatattagagctacctgtgttcccctgtcactgacattaaaacaaaaatgtccaatacaatcattcacagcgtgggagaggggaagttgaaggatggaaaggccaggcataaaaggatttcagaatttccgtccataaggaagtagctttgtgcactgtctgttactgtgtgcaaggtgaaatttgaagaatgaaaacgtgcagtaacaagggctcctttgtccaactcacctctccagataccaagtttcagacatgttgcattttaattgaaaggttgatataattttttttaaagaacacttgcggtgtttgaagtgacaaaggctgctgtgacaaaaaagcagggaaagggaatttttttttaaaagcaaacaacaacaacaaaaaccccacagaaaagcaaacaacaaacaaacaaaaaacagaggaagaagtcgaacaccctgggctgtgactacttccaggaaggggctacaagaggcagttggaaattctatttgttttgcaactgtgggttttccggcccgcttcctttctaaagtatattactctgcttttggttcatgaagttatccatttctgttttctggaacagctatgtattttctttatctatcatctatctatctatttaccatctatcttttctacctttcgctatcaagagcttgggtcaagcaggatagaattccagtgtatgttcactctaccatttaaaacaagagctcttgtaggcattctccatcacatcataaacctgagctttctaaaacagggtgtggcaaactaccatgcatggaccatgtctgacacagtctgcgtttgtaagtaaagttgtaatgggacacagccaatacatgtgttacataatgtctctggctattttcatggtataatggaagagctgagtcattgagagagagaccatatggcttggaaaacttaaaatatttaacatttagccccttgcagaaaatacttgctgactcttgtttaaaagatctctgtttagaatgctacctattgagttctggatagaatcacaactctttaccacaatcaacaccgcttcagccctgcttctatatccagcctcatctatttctgctcctcctcattttccttctggccatgctgatggattgtcagcttcccagatgtgtgagaatctctcctcccttcctaacattctcatgctctccctctgcctctcaagaacttcctgccccatctctcatgacaaatcctttctacattctttaagatgcagcccttttgctccttccttaaggatgtcttgtctggctctattttgggtgacgtgctccttctgcatctcccagagccagcctgtgtgtgtcagctacaacatttctttgcatctctgtgtcatatatcaccaaatctgcctaagcttgcatgagtcactgcatgacaacttcagactccaccagcattgtccccactaaccacaaggcttagacattcgtccagtatgctcggggttgtggggtggtagcagtaactggctggtgaccatcatttcttacatcagaatcaaatctgtagatctctgccattcataagtatttggagtttaaaattagcataaagattttccttaaaataagaagaaaggccttgagtaggcttttggaacataggatgtttccactggttcatttctgtgttcaatattcccacatgaatctgaacacgactctgctcttagtagctatgtgaccctgggaaagtcactcaatctccctcagctaaattttgttgtgtgagtaatgaggagagagttgtgatttgtatttagtgaataataacaaacaaaaggcatttagctttctggaacctggtatgtagtagaacctcatgaaatactagctctgttgataaaactagactgaaagaagctttcaaagtcaacaacagtttgaggcagtgaaggacgtagaggagaagctgctgctgcagtctgtagctcctggaagcccgttttgtccatgatttagcaggaatgcattacccttccatgaggaggcacagcccacagaaaccaaggccattctttgaagaaaaacatgtcttaatagggtttacattatgtaacagtgtaatacaaataataatttattattagtaataatataaaattatttacagtaccgtaaccctaactctaacccctaatcctaaccctaacccctaaccctaatcctaacccaaaccctaaccctaacccaaccctaaccctaacccaaccctaacccaaacctgaccctagcccctaaacctaaccctaacccctaactcctaaccctaacccctaaccctaaccctaaccttaacccctaacccctatccctaaccctaacccctaaccccataaccccaaccctaaacccaaccccaaccccaacccctgaccctgaccctgaccctgaccccgacccctaaccctaaaccctaacccctaaccctaaccctacccctagcccgaacccgaaccctaaccctaacccctaaccctaacccctaaccctaaccctactccaaccccaaccccaaccctaacccctaacccctaatcccctaaccctaacccctaacccctaaccctcaccctaaccctaaaccacatgagcaatgtgggtgttatattttgggtgtcatgtgtgccttaggaatgctgcatttgtattccaacgctgcaactggaccctgcaatgcagcccctcgccttgccttgggagaatctcggtgcgcaggattcagaggggcttttggtttcccgttttccacactgaaccgttctaactggtctctgcccttgattattcacggctgcaaccgggaaagatttaattcaccgtcgatgcggccccgagttgtcccaaagccaggcagtgcccccaacgtctgtgcttaggagaatgctgctccacctttacggtgtcccccaggtctgtgctaagcagaacgcagctccgccctcgcggtgccctcagcccgcccgcccgggtctgacctgaggagaactctgctccgccttcgcagtaccactgaaatctgtgcagatgagaacgcagctccgccctcgcgatgctctccgcgtctgtgctgaggagaacccaactccgctctcgcaaaggcacggcgcgccggcgccggcgcaggcaggcgcggcgcgcccgcgcaggcgctgttcgggagacgcggcgcagggcatagacgcacgcctccgcgtccccggaggggaggggtctctgggcgggcgggagtgaggcgcggcgcaggtgcaggcgcagagacgcacgtcgctgggctcagggtggcggggcgtgttgcaggtgtacagtcgcacgccgctgggcggggagcgcgggaatggcgaggtgcaggcgcagacacacgtccccggcggcgcggcgcacagacgggtggaacctgagtaatctgaaaagcccggttcgggtgccccctgcttgtacccgggcactacaggacccgcttgcccacggtgctgtgccattgcgccccctgctggcgactagggcaactgcagggccctcttccttacagtggtgtccagcgccccctgccggtgccggggcacggcagggctctcttgctcgcagtatactggcggcacgccgcctgctggcagctagggacattgcagggccctcttgctcacattgtagtggcagcacacccgcctgctggcagctggggacactgctgggccctcttgcttgcagtgtagtcggggcatgccctcttctgtccgctgggggcactacaggatcctcttgctcacagtgtagtggcagcacgccccctgctggcaaccagggcacttcacggtcctcttgctcatggtgtggtgcccctacgccacctcctggcagctaaggacactgcagggccctcttgctcacagtgtagtcgtcgttcgccccctgctggcagctagggacactgccgggccctcttgctgacactgtcgtggctgcacgccacctgcaggcagatggggactaggcagggccctcttgctcccggtgtgacggctggcgtcccctactggccgcctcctgcaccacttaaagtcagagcgccagttattaatccccatcagttctgtaaattaaaactgaaaaggagctattactggggagagctgatgtcccagttattaacttggaagaaagattttcaccaagaggcagtacaaagatggaagataacttcattgaaaagaaatacagtgtaaagagcttattgtaggaaaatagggaggagtgggttcatagtgcatgaaaacagcctaagagtcctgtgcagggaattttattttggacttcttcacattcctgcctctgtctcaagtctatgcttgttttccttggttttcctgctactgccttaggtccctgacttgccccacttaggcttgtgggacctcctgttgattgaggtacacgtggggtgatgaatctgaatccactctggcaccaacctccttcctgccatcccaggcaggctgacagcagtcacgtttgtatctactgcacctgcctcttttgaatgtctttctctgccctaatctgtacttatggtgccaggtttctcttaggaatgtcccctttgtccttcttatcagcatgtagctagcaatattctgacatttttattgcagagtgaatgatgattggggcatcttaagagaagttctagggtgtttctgcgtaggtacctcttctccctcctaaccacaattgacaagtgcccatcctctccagcactggagatgctactaatatgtgcatttttggtggtccctccaggtgagccttcacagactttcccttttccaggagctccccctcctgttcatgtctagctagctatctactctaacagagcccactatcctgtgtctttcccaaaaatagtgagggaattattaattggaaaccataagaaatcatatgcatgtagatgaaaactttacaacttacacaaataatcactcaaaatcatccttacactaaaaaagcaaaactatacaatttctagaagaaactatagaagaaaagctatgtgcctttgcgtttggtaatgaattttaacaaatgacacagaaggttgatatacacagaagaaatgacaatgtggatttcttaatatttacagtttatactctggaagagaccttgttaagagaaccaaaagacaagccacatattgaagaaaatatttgcaaaatacagatctgagaatttgtattcaaaatacataaaaaattgttaaaactaaacaataagttaaacagcccaattaaaaatgcacacagatctgaacagacgcctcaccaaagaagatctacagatggcaagtacacttacaaaaagatgctcaacatactagagaactaaaaaccacaaaaagatagcacagctggtctatatctcttagaactgctaaactctttaacaaatgacaaattgctggaggaaaaacaagaactcttttcattgccggtggaacacagtgtataagaccaaaatatgccaccccaaaatataatggtaggaaaccagaatatgcaaccccaaaatatgtccctttggcttaagaattattccaagctaattattttgaaaaaaaaaaacgctaacaaaggaagttgtgaaaacagagtagaagttacacttgtgtaaggaaaatttacatctataaaggaaatcaccatttaaaagctacctctctcgacaccaagaagagaaggataactaaatcactaaagagtcttatcaatggagaatgcatggacttaagtctgtataacgaaccttacccttgtctaatgtgcttttgctggttaactccccaatactgcacctcaaatcttctttctttaagttgaagacagtacttatgcttgaattgaaagccacctgttggagatttactcatttttccctgagtatctcccatgtaaccataaggtatacgtgtttttctacttttctgtttttctcattttaatctgtcagtttttacagagcatcccatctaagaattctgaaaacagaaaattatttttcctcccctattacaagttgggcatttttttccaaagctaaacaagtctcaccttacaatccaaaaataacattcctaagtattttgacaactactttgatgttatttccaatcaaaagctaccatgcaattatttacataagccctattcataatgaccaaaggaaaaaaacggaatcagaaagtcttacaatagatgactgtgtgggaatccactcagacatcaaaagttgttataaagattatttaaatgaaaacatttgagatactgaagataaaagaagaaatcttaccacaacttactttgtccaattaaagcagagctcccagaaaaatacagctgccattaaccccatccaaggagtttcttgcaaattcagctgccatgaagacagcgtactctttcgcattagcattgataaacaaaaattaaattataagctcccaactgactgaacagaaccactcttggctgaggggaccacagagtaactttcaaaactgagttctcagctttgctaggatgggatgatggggttaacatacacatcgttaaacccactcctttgctaaccatgatgaggctttcttccctaaggatttaacagaaaccagccctttcaaagcctccactactgatatcaacctctcctttcttgcctgataagagaccacccacaacagagaggttctggccagcgtacagaggatgcacagagcgagttttcatgtcctctgcttcaccttttaatgtcagagggctgaaaactccaccctgggatcatgctaacactgccattttttgtacatgggacccatgaagaagccagaaactcaattgtgcatgcatgcatttctccttccataaatattcatgactcctcctggagcttattaaataaatgtatttggccattccagtcagcataaattgctatttcctttacctcctccttgaagagtctgtttctggcttctggctggaggctatgcttcccagcctgtcagaaggacaaccctgcaggctacaaccctttataggaaataaatctctcactggttgggtggctcatgcctgcaatcccagcactttgggaggctaaggcgagtggatcacctgaggtcacgagtttcagaccagcctggccaacatgatgaaaccctgtctctactaaaactgcaaaaaattagccaggtgtggtggtgggcatctgtaatcccagctaatcaggaggctgaggcaggagaatcgcttgaacccaggaggcggaggttgcagtgagccaagatcacgccattgcactccagcctgggcaacaagagtgaaactctgtctcaaaaaaaataaaaataaacataaaaatgaagaaatgtctcctttccaaatttatgaacctcatcattcttccgttgacagcattaaaaggttcaaaaagacctttccatactctcccacagaagccctagaaattgtcattttgttcatcattctggatgcctgagaacttgtaatccaatgagtagaaagtttggtaccccatttatggctgtcaacctgccagttctcaggagtttgtaaaagcctaaatccgaaaggatctcatcccattaggacccttgtctccttttctgttgcctttgcccactggctctggcaacaggggtctttctttctccttggctatctttggatatgggggctccgtcttctgtgccaccttagggaatgccttttgcatgcatggctaagtcattaaaaagcctacagtttcagtaacattttgagtgagtactctctgaagctgcgttggaatctcaggcttctttgtctggaagataactcttgggctacaagtttcttatcctagctttggttttgaggcctctctgttctcctcttgggttggaagttattcctggctttttgtttcaaggtgtctctgtgatcttgaacttgctcctttcatgagaacttctcagttgactaaattctcccttctcaaacctctgctatgtgttccaccaatatggaactaattctacttcctttcctgtttacatgattttactaagaattatttagaaatttaattgctcctttgagaaaatttttatcttccaaattgcctccttttagacttttcctttcccagttgagtctctcaactccctgtaatcactgaaactttaggcaccccactccatgccttggaggctctcaatgtgctcaagaatctgcaaaagcaaacacctggggctgaaaaataaaatagaaaaaaaaaatatttctcatcctccataagattgtatgtgaaaacaaaagaaaaccttaaaaatctccaaaaatattggtgagaaaaaagccttagccctcatatgaagaagaaaaaacttgttccattttccagttacacagttataatacaaatataaaatgaggcaaagacaaaaaccaagtcttctatataaactagtgaattttgtagtattgcaatcacattagtcagggttctccagaaggcagaatcaataggatatatgtagatagatgagagaagattcattaggggaattggttcacataattatggaggctgagaagttccacaatagcctgtctccaagttggagaaccaggaaagctggtagcgtggctcactccagatacaaaggactcagaatcagggaagccaatagtgtaactctgattctgaggccaaaggtctgagaccctgaagttctgatgtcaagggcaggagaagaaggatgtttccatttcagaaggagataattcacctttcctcttccttgttgttttatctgggctctcaaccaattggatggtgcctgtattcatccatttttatacagctatgaagaaatacctgagtctgagcaatttataaagaacaaagaggttgaatgggctgacagttccacatggctgcagggccctcacaatcatggcagaaggggaagcaaagctgtccttcttcacaaggcagcaacaaggagaagtgctgagccaaaggggaaaagccccttataaaaccatgagatcgtgagaactcactcactgtcatgggaacagcatggcagtaaccaccaccatgattcagtcacctcccactgggtccctcccacgacatgtagggattataggaactacaattcaagatgagatctgggtggggacacagccaaaccctatcagtgcccatccacactggatcatgcttatctcagtgtcttccagaaacaccctcacagatatgcccagcaattgtgtttgaccagctgtgtgtgtctctcaatccagccaagtagatgtctacaattaaccatcagaatatttatgctagattcatggctgaaattgtgtttgaccagctatgtgtgtctcttaatccagtcaagtagatgtctaaaattaaccatcagaatatttatgcctgattcatggctgaaatcgtgtttgaccagctgtgtgtgtccttaatccgatcaagtagatgtctaaaattaaccatcagaatatttatgcctgattcatggctgaaatcgtgtttgaccagctgtgtgtgtctctcaatccagtcaagtagatgtctaaaattaaccatcagaatatttatgcctgattcatggctgaaatcgtgtttgaccagctatgtgtgtctcttaatccgatcaagtggatgtctaaaattaaccatcagaatatttatgcctgattcatggctgaaatttcaggatgaaagctatgaaatctctatttctgtttgtacatctattaatgtatgttatgtatatgtgatattttcttaactccggagagcattgcaaaattcatttataaaatcctctaaaagtgctctattctaacttggcttggaaaaaaataagcatttataaataaatattcaccaaactcctagaaatataggaactgatcaaatgttttttaagttaacacgatttggataaaacttagttaaataagattaatataatatttttggggtagccattgtgggttatcagattctagtcttgtttcttgtttctgggctatttttacctctttgtaaactggatcctgccatctgatgaattttgtcccacaatgatacttgggcaacaagaagccaagtattttctctcctagtaatgtatctattgtcatttaatttgaaggtcttcaaccctggaacaaagttagaagaggaaggttttgatccccaaaatgcataaccaaattgtggtacattcatgcaatggaatgctatttagccatagaaaggaacaagatatcaacacacacaaagacatgagtgaatcttgcatgcacattgctaggtggcagaagacagtctgaggaggatacacacagtgtgacctcatttaatgagacactggagaaggcaaactacacagatgggaagccattggctccatagggtggaggtttgaggcattccatatgatactttaatagtgggatacctgccacaatgcatttgtcgaaatacgcagaattttacggccaaatggttaaagcaaactctattcaaattacataaaattactcaggatgtggagtatcccacgacagaatacatcatgtgaaaaagaatttatgctacaaattactatggtttggatgtggtttgtccccgcaaaaactcatgttgaaatttgacccccactgtggcagtgtggggcggtggggcctagtggatggtgtttgggtcgtggggacggatccctcatgaatagattaatgtcctccatggggtaagtgaattccattctcacaggaatagataattcctgcaggagtaggtaattaaaaagagtctggcttccttggcttccctcttgctttcacttttgctatgtgatctctggtgcaccccttgctccccttccactttccaccatgaggtgaaaaagactgaggccccatcagatgcaactgcccaatctgagacattccagccaccagtattgtgagccaaatgaaccttttttacttaaacatcagaatatttatgcctacgcataatattcagaatacgcagcctcaggtattctgttacagaagcacaaaatggactaagacacaaatgtaggtaaaaactcactgaaggtgtagagaaaatggtgttgacctaagtcactttgaaaatgaatagaatctgtaggctgaaggcaagtgaactatacttcatcattggattccattttataaagttctttccaacagaagcaattgtgaacaattgtaaaaccacagtgtctgtatctggaataaaacaatgacttacataagtcgcagatggtgggaaccagctttctcactgttgaagtgggaggttacaaattagcaaggtgagaagactagaatgattcatgtaatagtagatcagaggtggagacatcaatgtaaacttatgtttagtttaatatagatgcacagttctacatagaaaactttgtaattaggtgtgtaaaggtaggttagacacacacatatacttcctagcattgccaataagggagaagatacaatgtgctcattcagcagccagatgtaagttttcctaccattctgaaaggaatctgactctttgaagaaatgtctgatactagaactgggacagtaaatataggagccaggataatctggaaggatcagaaagtaagtaagtactaaaaaaattaaaatatatcaaagaaaaataagagccaataaaaacagctactgatggccaacacaggaatgaattgtgcaacataatactgtagtgttgaataataactaaagcttaaagtaattatctaggtgtctgtatttgtatacataggtgaataagcaaatggagttgcatagaaatctcctttgcaaaagaattccaaataattgatgtagacactcagccatcaagaaagtggagccaactcctcactctgtaagtgtgggctctgcatagtgacttgctccaaaagaacacatgcagtatggacaaggaggagaaataacctcacagtggagaaatctgacaaacagtagctctgccaaacgatccaagttaacatcaaagctgacagttcaccttgagaacatgaagtgacaatggggggcattctacaaaatgcctgacccatcctcctcagtactatcaaggtcacctgagatggaaagcctgacacactgtcacagccaggaagagcccacgtgatgactacatgtcatgcgggatcctggatgggatcctgggtcagagtaagacagaactaagggagtccaaatgaaatatgaactttagttaataatagtctcagtattggttcattaactgtgacaaattatgtaagatattaataagccatgtgagacacactgatagaagatgttaataagagaggaaactaggttgcggctacatgggaaatctctgcttttttttgacaatttctgtgtaagtaaaaaaaatgatgtaaaataaaactttatttaaaacactgttttttttgaacacttccttgtttaattatttataccatgaattactagtaattgacactgttaactagtcctgtttttttaaataagagtatttatgacacaaaaaattaaacagtgcagactgatacataaatcaaatgttctttacatgttttctgttgcagtagtaacacacatgtgtaaacttaattatcacatgtttttcttgtgctgtggttgtgtcctgggttcattctctaaaatgctgttcatcttagaccaggaaaaatattaaccttacagactctgtttcaattcatagctaaatattttcaaaagagtgactttgtaaaaatatgttccaatggcaaattgattcattgtgatgggatcacttattccaaagacttcctgtctttattttgttgccatgcctaccttttagccatgatacaacagaatcaaatattggccactgggaaaaaatattcaaagaaagaaagaatgtgaacagaacttatgaccatgatgattcaatgttttaccacaatgctttctaaaacagaagagtgtaaaaggatattcaaagtcaatttcctcactgaggctttgcagaaaatgaggaaactagagaaacaaaaatggcgggacattctacgggtgattttaaatgttgctatgttttatgggaaaaaatactttaccttttaaagaatcacaaagaattgttggaaacccaaactctggaatgtttgcaaatttagttgagcttctatgtaattatgtctatataggtagccacaaagttgatgatttttaaaaatctgtgccttatttgtgtaataaaatacacaatgaataattaatgttcctaggaaaaccttatgaagggaaaataaatcttggggaatcaaaatcactaagctaaaaggaaaagtcaagctgggaactgcttagagcaaacccgcctcccattctatccaaagtcacccatctgctcactgagataaatgcatatctgattgcctcatgtggagagggtaatcagcaaagcaaaagaatgaaaccatttgtctcttacctacctatgacctggaagccccctgtctgtccttctcacctttctggactgaaccaatgtacatctttcacatattgattgatgtctcatgtctccctaaagtctataaaaccaagctgtgccccgaccacgttgggcccatgttgtcaggacctcctgaggatgcatcatgggtgcacatcctcaagcttggcaaaataaactttctaataaatctgagagctgtctcagattttcagggttcacacatgtaatgtaggatgtcaatgtttataaaacagacattattctatctactattagaaatatgctaccaattaaccttagactttctcaacaaaataaaaaatgttgatgaggtacaaataatatactaagcttaaatagtgttgcaagttttaatatgcaacactatttattaacatttattaaaatgttaataaaattaacatttttcaatactatttttactaatttaacactgtaagaaaagtgaataattaaaacatgaataaaagggtttacaaggggtgcacatgtttcctccagtctctgcctatccccagctttcatcccaactgtcttgatggtggctctaagcatttctcctttctctatgccaagatctctcccagaaacaaacccaaatcttactatatattatggcacgttatgatgatgagcagtgatgagcagccgaagcctcaaggaagggatgcttttgtaaaacaagacttgtagaatataacgtgtgaaagtaaagcacatggcagagctccctcctcagcacacgcggagcagacaggaagcttttgcctcaccttcctcaatggcctgcagccacgtctcccaggtcagtcttaaggacaacgaaactctggtcttcactgtggacacgccacactaccaggtgctccaaagccatggtgactcaccctcgggtgggtcctgagcacaacaaagctctggttctaatcctaaccctaaccctgtcccaagactttgaccctgaaccgaaatcctgatccctaccctggtccctaattctgacccttactttgaccctgactttgatcttgaccctggccatgaccccacctctaaccatacttccggccctgactctgacccagatcctaatcctatgcctaaccctattattatctttacaatctaactctaatcttaccctctagtgctaaatagctgtacccaaaagcacttttaaattatttaacttcttttcttgaattctctatggacatcctaaaggagacgtcattatgtattttgcattccctctgagtagtatggcttcagatatgaagttgtaatactttgcaagacataaaaagtttggagggtaacagcactgggttgttagggatgcatgttggcattcatgatagtcattggtgctgttctccaaatattttcagttcattttttatgaacgcattctgactgttccatcccacccacttaaattttcccatggctacatgactttttttttttttttttttttttttttttttttgccgatggaggtgagaagaaataacatgtgactttttcaggagaaatctccaagaaacagcgttctattccgcatgcttttttctcttttctatagcaatggggatcttattgatggtccctccttccttctggattcctgtgttaggatgacacagcacagagctacctctcacctgacccgtgatgagatgtaaataaatgaggaagaagatttttgagccactgaaatttggaggttgtttgtcaccacagtttaagctagcccccactgactgatgcacggctgaagaatgagtccgaactggctctggacaagacatgtgaagagcgctccaggctgagtaaaattcaagggttgcctcaaagataacactgagcacgatatgttattggggtgggtgtgggataaataaggtacatcaggtgagaataacaagaaactcaactttaaaagacggcgctgatttgcactgtggagagattcaaatgccctgcttagcatttgagattgtgatggatgaacaaactaattaagagcccaaaatgaaagctggggataaatatctgaaggtgtctaatatcccagtttttcatcctagaatgggcagagtccttgaccccattctagggagatttccaaaagaaaaaagacctgcatttcttcagcaacccacactgagagactttcctgcacttttgacctgtggctaacactcctcacctttcattctgtcatcagtgttttggggaagcacctttaactctctatgatttacaggttattcctaacctgtaacaggttacaggttacaggttattatgtaacaggttacagagcaagacgccgtctcaaaaaaaaaaaaagagagacaacactattcttaataacctatataaacaaacactaagcccagatgcagtggctcaggcctgtaatcccagcactttgggaggccaaggcgggcggatcacttgaggccagcagtttgaaaccagcctggccaacatggtaaaacccagtctctgctaaaaatacaaaaaattagccgggcatggtgacacacacctgtaattccagctacttgggaaactgacgtaggagaacccttgaacccaggaagcacaggttgcagtgagccaagatcatgccattgagacgagagtgaaactctctcaaaaaaaatttttttaatttaaaacaggtgcgttccttctcctgctttctgaggacgccctgctctgtaactgaatagtcgctaataaactctcttaccttcactatactctgtgacttgccataaattctttcccatgtgagatccaaaaacccactctcggggtctgggacaagactccttttctggtgacaaaattattcaaattctagaagaaaacatagaaagaaagctatgtgacattggatttggtcatgagttttaacacatgacactctcagaggcatttgaaccacagtgaatccatcttgattaagggctgggtaaaataaggatgagacctgctgggctgcgttccgaggaggttaagtgttcttaatcacaggatgagataggaggtcagcacatgatgtaggtcacaaagaccctgctgataaaacaggatatgggaaaaaaaaaaagtccaaaaccaagatggagatgaaagtgacctctagctgtcctcactgctcactatacactaataatatattagtgtaaccatccaagaggttcaccttgccctctacctacatgctggacagccaggcacggtggttcgcgcctgtaatctcagcactttgggaggccgaggtgggaggatcacctaaggccaggagctccagaccagccaggacaacatggcgaaacccctatctctactaaaataaaaaaataaaaaaattagtcggatgtggtggcgggtgcctgtaatcccaactactcgggaggctgaggcaagagaatcacttgaatccagaggcagaggctgcagtgagtctagatcaccccattgcactccagcctgggaaacaaaaacaaaactccgtctcaaaatttaaaaaaagacaagacacagaatgaaacgtaacatttgcaaaatagagatctgagcaacaatttgtattcaaaatatacaaagaattcttaaaactcaatagtaagataacctaattaaaaatgggtcaagatctgaacagaaacatcaccaaaaaacatgtagagatggcaaataaacataccgaaagaagctcaatttcgtatatgattgggggactaaaaattccaacaataatgagacccagcggtgtgagacggtgtgaaaacccaatggtgatgagacagcgtgtgaaaattccaacagtgatgagatggcgcggcccatctgtacccgctagaactgaggcaggaaaatcaagtctggaatcaggaacataaggcggattcacacttcaactatgacaggaaatgtcctctccacagggctactccaagtaaatgactttgtaactttacttcatcctcttcatttacacggggtggacaccaagtaaccattgaaatcctttagagggtatttaaacccccagaggttttgcaacggggcccttaggccctatgctcagcccgctcccacactgtggactgtactttcattttcaataaatctctgcttttgttgcttcattctttccttgctttgtgtgttttgtccaattctttgttcaagatgccaagaaccaggacaccctccaccagtaacacaactgctaagctctaaaaaaaactgacaaatggcccggcgcggtggctcacacctgtaatcccaggactttgggaggccgaggcacatgcatcatgaggtcaggagattgagaccatcctggcaaacatggtgaaaccccgtctctactaaaatacaaaaaaaaaaaattagccaggtgtggtggtgaacgcctatagtcccagctactgggaggctgaggcaggggaatcacttgaacccaggaggcggaggttgcagtgagccgagactgtgccactgcactccagccctgagacagagcgagactctgtatcaaaaaagaaaaaaaaaaaaggactgtggggaaaagagagatcacattgtttctgtgtctatgtagaaaaggaagacataagaaactccattttgatctgtactaagaaaaattgtttctgctttgagatgctgttaacctgtaactttagtcccaaccctgtgctcacagaaacatgtgctgtattgaatccaggtttagtggatttagggccggtgcaggtcctcacatgctgagtgtgccagtcccctgggcccactgttctttctctatactttgtctgtgtgtcttatttcttttctcagtctcttgtcccacctgacgagaaatacccacaggtgtggaggggcaggcccccttcaaaggacaaatgaattgctggaggaaaaccaggaagtctcgttcaccgctagtggaatgcttaatggtacagccattacgaaagatggtgtagaagaccagaatatgccaccctaaaatatgactctagagactataaaaaatggctctttggcataaggattattttcaactcattttcagaaaatgcagacacagaaacagagtagaagttaaccttttataagggaaatttacatctaccaaggaaatccccattttaacagagtctccctctcagtaccaggaacagaatgatgactaaatcaacagaggttcttctgaagggacttccagaaacaccttcacaaatgcacccataaaaacacacccagaaatagtgctttaccagctatgtgagtatcccttaatcctgtcaaggggacagctaaaattaaccatcccagtatttatgcctaatttgtggctaacattttatttttacatttttcttattattattattatttttttttgagacagagtctcactctgtcacccaggctggaggacagtggcacgatctcagctcactgcaacctccacctcccaggttcaagtgattctcctgcctcagcctcctgggtagctgggactacaggcacacgccaccacacccagctttttgtatttttagtaatgatggtgtttcaccattttggccaggctggtctcgaactcctgaccttgttagtatcattattttttttgagacggagtctcgctctgtcgcccaagctggagtgcagtggcgtaatctcagctcactgcaacctctgcctcccaggttcaagcaattcggctgcctcaacctcctgagtagctgtgattacaggcatgtgccatagtgcccagttaatttttgtatgtttagtagaaatggggttccgctatgttggccaggctggtctcaaacttctgacctcaggtaatctgcccacctaggccttccaaagtgctggaattacaggcgtgagccaccacgcccagccaagagcaggctgttaaaaagagtctggcttccttggtttctctcttgctttctctctcgccatgtgatctcaggtgctgggattacaggcgtgagccaccacgcccagccaagagcaggctgttaaaaagagtctggcttccttggtttctctcttgctttctccctcgccatgtgatctcaggtgctgggattacaggcgtgagccaccacgcccagccaagagcaggctgttaaaaacagtctggcttccttggtttctctcttgctttctccctcgccatgtgatctcaggtgcacactggctccccttctgctttccaccatgtgttgaggcaccataaagccccaccagatgcagctgcccaatcttggatgttcctgccaccagaatcataagccaaatggaatgaacttttttttcttttcttttattattattattattattttttgacagggtcttgctctgtcacccaggctggagtgcagtggtgcaatcatggctcaccgcagcctcgacctcctgggctcaagcaatcctcccacttcagcctctcaaggttgggaccataggcatgcaccaccatgcctggctaattttttaaattgtttgtagacatggggtctccctgtggtgcccaggttggtctcaaactcctagactcaagggattctcccatcttagcctcgcaaagtgccaagagcacaggtgtgagctaccatacccagccagacataacattttttttttttttttgagacagagtttcggtcttgttgcccaagctggagtgcaatggtgtgatcttggcacactgcaacctatgcctcccaggttcaagtgattctcttgactcagcctcccaagtaactgggattataaggcgcccgccaccacacatagctagtttttctatttttactagagacagggtttgaccatgttggccaggcttgtgttgaactcctgacctcaggtaatgcacctgccttggcctcccaaagtgctgggattacaggtgggagccgccatgcccggccaacataaatttttaatagcgttttctaatgaaagcaatgagggctctctgaagaaatggccaatacagggactgggacagtaaatatatgagccaggataattaacataccagaacaaaagaaagtactcaaaaaatatgaaattatgtcaaaaggaaaaaagaaccaatggaaagagctcccaaaggccaaagcagaaacaaattgagcaacaaaatactgcagtattgaataaccaaagcttaaagtaactgtctatgtgtccacatttatacaaataagtgcataagcaaataaagttgaatagaattctcctttacaaaagaattccaaataattgatatagacactcagccatcaaagaggtggagctaacatcccactccttaaatgggggctgtgcatagtgacttcctccagaagaatacatacaatatggacaagtaacttcacagtagagaaactggacaaacactagttcagccaggtgatcacagttaataccaatggtgataattcaccttgacaccatgaagtgacaagaatagcacttcacctctgtgatctgcttcccccaaacccataaccccagtcaacttctcagaaaagcaccaggtaaataacaatgggagacattctacaaaacgcctaaccagtcctccttaacaccgtcaaggtcattggaagaaggaaagtctgagaaaccgtgacagccaagaagagcctaaggagtcgtgacaacgaatgttacgtgggatcccgggtgcgaccctggagtagggaaagatagaactaagtgtaaacagtaaagttgaggttcctcttcaaagactttcctccccatctaattaggaataaatagtaacttctcttagatgtaaaaattattcaaagatctgtgctaacattcttaaatatctgctggccgtaataaagaaatcaaggtactgtatgttcttagcgcccacaatttagcctaaatatttgcctgacatgcttatactggtccaagcaagcattaggttatagcctcttcctcttccttatttgaaggtgtttttacctttcacagcattccacaagttacttcttccttcctttgttatcctctgcctttgcctcttttaaaaatttataagttgctagaagatcagaacaaatacagaatgtggggtcccgtttcagccaatggaaaccggacacagcagtagggtggatgcgtcaggttataaatgaccttgtctcctttgttctggatactctcgtggtaaaactgctggcgagtgtaccctttatgcagaaagtaaaaaaacggccttgctgaggaaattaaatttatgttcaagtgctatttctttacagcaccggggaacaagcatttctaacatgaggaactccaaataaaatatgggcttcagttaataatagcatatcaacatttgttcattcactgtgacaaatgacgtgagacatactgatagaagatgttaataagagaggaaactgggttgaagctacatgggaaatctgtgttttctttgttatttctgtataaatctaaaacaactctaaaataaaacttaatttaaaagtgttgtattttttcaaacacctgcttaattatttgtactagtaattactagtaatttaccctgttaactattcctgtcttttaatcagagcatttatgacataaaaattaaagcatacagattaatatctaattccaaataaatgcctctacatgttttatgttaaagtaataacatagatgtataaacttacttcacataattttttctggtactgtggctgtgtcttgggttcactctctaaaaaggtggtcggtcgccttttagacaaccaggaaaaaaattcattttagagactctatttcaattcatggttgaacattgtcaaaagaatgtttaaaaaagttccttagtatccaagatttaaaaaaaaaaatgtttcaatggcaaatcgattcatcgtgactggatcactttctctaaaatatccctgtctttgttttccatgcatgctttttagcaataatacaacagaatgcaatattggccactgggggaaaagtattcaaagatagaaagtgaatagaatttgtaaccatgataatttaatgtttcattgtgatattttctaaaacagaagagtttaagaatattcaaagtcaatttcctcaatgatactttgcagaatgtgatgaaactagagaaacaaaaatggcaggatattctgagtgattttagatgttgctaggatttatgggaaaaaataatttacctgttagagaatcacaaataattattggaagcccaaactctgaaatgtttccaaatttagttgaacttgtaagtaattataatgtcaatatagctagtcatgaagttaatgataaaagacgacccatgccttatttatgtaataaaatatacaatgaatgattaatgctcctcggaaaatacgctggacttgaactacaattgagagtgtcagaatcaaaatatatttgattgtataacaggagtagcccatcatgaacaaatgtatcatctcataaagtatgctcacgttaaatatactgtcagaacaatggaaaaagctgttttgcctttgttgaaagaataatggagacagtccagcttagggaattattaggttggaaacatacaatgctggcataagaacgtcctggacagggatgtaacagtgaacagctctggcaggtgtaggaaagggtcgcagccatcatatcccctccccaaatgctcaaactaaatctgcacatacgtctgtattaggatttggtacatgttatttcgtgtggggaggtataaacaatgcatttaaactttacgtttctagttagaatatgcctattgctaaatatttccatactgattcaactacttcagtgctgtgagacaaatgagctattacaacacgaatgaaagcgctggcgactccgcagcgccggccggtccccagccatcacccgcgccgtcccgatggcgccgctcgcgttgctcctttctcggcgccaggatctctccccaggaaccagcgcagatccggaggccacgctgcgctgcgctgcgctgcgctgcgctgtcaggacgcgcagttcccgccccgctgaagggacaccgttttacaacacgccgcgtagaccgtgacagggaagtaaggcccacggcagcgctccctcctcagcactcgcggccgcggacaggacgccttttcctcctcctctcacctggtgaccgggtgtcccgaaccgcggccgctcccgggcgggtcctgaagagaccgtggctccgtcttcccggtcgacgccccggggcgacgagtgcggatccgccgcggttcccgcgcgtgctccaggttgggcgggagccgggcgccccctcgcggcagtcctggggagtctctgaaaatcagcgttcggatgactgcaggccgtgatttcggaaatgtcaactgaaatcgaggccaccatcccgtgccttgatcggaacggatggagattttaaaaactaaaaaagatggcccgggcgcggtagctcacgcgtgtaaacccagcactttgggaggccgaggcgggcggatcacccgaggtcgagagtttgagaccagcctgaccaacgtggagaaaccctgtctctactaaaaatacaaaattagctgggcgtggtggcgcatgcctgtaatcccagctactcgggagtctgaggcaggagaatcgcttgaacccaggaggcggaggtttcggtgagctgcaccattgcactccggcctgggcaacaagagtgaaactccgtctcaaaaaaataaaataaataaaataaaaactaaaaaagatgtccagtaggcaaaagtcagttgagtttcttcatatcaccaataatggatggaaataattggaactagaaatattaaaataccatttacaatagcacccctgaagctgaatccattaagtatcagcgtaacaaaaggtgtgcaaacatgcattcggaaaaccatgaatcacagttgagagaaaccaaaagaggtataagtaaatgcagagatgttccttatttaggagaagtacactcattattgtgaaggtgacaattctttccaaatcgatctatagattcagccaaatcccagttaaattccaggcaaagatatcgacaaactgttcctaaacccagaatggatgaaataagactgaaggagaacaaagttaaagacctcacacatctggatctgaacactcaccctaaagccacagtaatgaagagagcgtggcagtggtgaagcggttagacacatagataagtgggacagaacagagagcccccaaacagactcaagccaactgactttgtcaaacggacaaaggcaactcagtggagaaagagaagtctgttccacaaaagacaacagaacaattgcaaaccataggggaaagaaatgaatggagacaaaaaccttgtattttatccaaaaattcactcaaaatagtccatagacttaaattttcaagtgcaaagttgtgaaagttatagaagaaagccgagaaaaatatctgcatggccttggtttgggtgatgagtttctagatgcaatacaccaaaagccaacccacaaaagaaaacaaaacaataacggggactttattaaaatttaaaatggctgctctggttaagagaacaaaaaagcaattcacagactgattgatagaaaatatttgggaaacagccgggcaaggtggctcatacccataatcgcagcactctgggaggcca[133 bp omitted]ttactcgggaggctgaggcaggagaattgcttgaacccaggaggcagaggttgcagtgagctgagatcgcaccactgcactccagcctgggtgatggagtaagaccctgtctcaagaaaaaaaaagaaaatatttgggaaacacatccgaaaaaggacttgtctgcaaaatatttttttttaaaaaaaacctctaaaactcaaaaagaattagatgaacaacccaattgaaaatatgtgaagatctgaaaagacacctcagcaaagaagatgcacagatgccaaataagcatccaaattaattaattctcaacaaacttgtcctgagggaaaagcagattaaatgagatagtactgtacatctattaaaatggctaaaatctaaagaacagtagcaattgcaataggaggtctcattcattgctgggggaaggcataagggtacagtcacttcagcagtttttccaaaaactaaacaagtctcaccatctgatccaacaatctccttcttaggtatttagacaactgccttgaaaaattatgtccaagtaaaaaccagcacacacatgtatagaagcactattcataatagccaaaaattaaaggaatcatgacattcttcagtagctgaatgcataaccaaactgaagtatgcggtgcaatggaatgctattcagcaaaagaaaggcatgacctatccacccacgctacccggatggacctcacaggcacactgcttcatgagagagaaagtcatgacctatccacccacgccacctggatggacctcacaggcacactgcttcatgagagagaaagaaaggcatgacctatccacccacgctacccggatggacctcacaggcacactgcttcatgagagagaaagtcatgacctatccacccacgctccctggatggacctcacaggcacactgcttcatgagagagaaagtcatgacctatccacccatgccacctggatggacctcacaggcacactgcttcatgagagagaaagtcatgacctatccacccacgccacctggatggacctcacaggcacactgcttcatgagagagaaagaaaggcatgacctatccacccacgtcacccggatggacctcacaggcacactgcttcatgagagagaaagaaaggcatgacctatccacccacgtcacctggatggacctcacaggcacactgcttcatgagagagaaagtcatgacctatccacccacgctccctggatggacctcacaggcacactgcttcatgagagagaaagtcatgacctatccacccatgccacctggatggacctcacaggcacactgcttcatgagagagaaagtcatgacctatccacccacgccacctggatggacctcacaggcacactgcttcatgagagagaaagaaaggcatgacctatccacccacgtcacccggatggacctcacaggcacactgcttcatgagagagaaagtcatgacctatccacccacgccacctggatggacctcacaggcacactgcttcatgagagagaaagaaagtcatgacctatccacccatgctacctggatggacctcacaggcacactgcttcatgagagagaaagaaaggcatgacctatccacccacgccacccggatggacctcacaggcacactgcttcatgagagagaaagaaaggcatgacctatccacccacgctacccggatggacctcacaggcacactgcttcatgagagagaaagaaaggcatgacctatccacccacgtcacctggatggacctcacaggcacactgcttcatgagagagaaaggcatgacctatccacccacgtcacccggatggacctcacaggcacactgcttcatgagagagaaagaaaggcatgacctatccacccacgccacccggatggacctcacaggcacactgcttcatgagagagaaagaaaggcatgacctatccatccacgctacccggatggacctcacaggcacactgcttcatgagagagccaggatgcagaggctgtacgtccccacttatatgacatgctggaaaggcaaaacaacagagatagcaaactgatcagtggtgacacgggattcatggcggtggggatttgaagtactccatgtgatactttaactgtggatacctgtccctgtccacttgtgaaaagtgatagaattttaaagcccagagtaaatcataatgtatgcaagtggaattacattatttaatatgtgggaatatccctggatggaacacagaatgtgaccaagaatctaactgtatcacaaaagattaaaacaaaatccctgcagggcaaaacgtactgacctgaaaggtc[146 bp omitted]aatacaaaaattagctgagcgtggtgacgcgttcctgtaatcccagctacttgggaggctgaggcaggagaatcacttgaacccgggaggcggaggttgcagtgagccgagatcgcgccactgcactcaagcctggtgacagagtgagactccgtctcaaaacaaaaacaaaacaaaaacaattattgaaccattgtatctccacctggaatggagcagtgacttatgtaagtggcagatgatgggaagcaggtctctcactgctgaggtgggaggttacagattagcaaagggaggctacaatgatccatgtgataataaaccagaggggcaacatcagcatcaactcatacttagcctaatccagacaccgacagctccacatagaaatctcgataatcaggcggtccacataggttggaaacacacaggtgtttcctggcacgtcagctgtaagacctaaaggcattgaggccgcaggggcaatgagtgcattcagctcctaaatatagtttttcatgcgattctacagtgaaaggaaccagggctctttgaagaaatggcttcactaaaactaaggcagtaaaaacatgagcctggatgatcctgaagtatcaaaaagtaaggaactgctcagaacacagacacacacactctcaccccacacacacacacatacacacaagcacacacacacacagattatgacaaagaaaaaccagagccaacaagagctcccaatgacacaaatgggaatgaataaagcaacaaaatcctgtagtactgaattgtaaccaaaacttgaaataactctccaggtgtccacactggcataggtcaatgattacacacgtaaacaaaagtgggtgagagaaatctcctatgcagaaaaatcccaaataattgtagtggacactcagccattaaggaagtggcgtta[131 bp omitted]gcgctgatgtagaaattgcaggcaagttatccagatccagctaagacggttgatgaaaatggctacactaaacaacatattttcttttctttttttttttctttgagatggagtgtctctctgttgcccaggctggagtgcagtggcgcagtctcggctcactgcaacctccgcctccctagttcaagcaattctcctgcctc[134 bp omitted]ccctcccaaagtgctgagagtacaggcatgagccaccgcgcctggcctaaacaacatattttcaacatagacaaaatagccttcttactaggactttcatagccggggaagagaagtcaatgcctggcttcgaagctttagagaacaggttgactctgttcttaggggctaatgtgacttacagccaatggtcatttaccattctgacccagggcccttaagaatgatgcaaaatctactgtgtctgtgctctataaatagaacaacaagcctaggtgacagcacatctgtttaatgtctagtttatggaatattttaatctgactgttgagacctattgctcagtctgttgttgcccaggctggagtgcagtggcatgatcttggctcactgcaacctccgcctcctaggttcaagtgattctctcctgtttcagcctcacgagtagctgagactacaggcacccaccaccacgcctggctagtttttgtatttttagtagagacaggatttcaccatgtccagaccatggtgagaccatggccagactggtcgcaaactcctgacctcaggtgatccacccgcttcggcctcccaaagtgttgagattccaggcataagccaccacacctggccaagaaatacatattgtaaggctacagctgctacagataatgattcccctgatggatctgggcaaagcaaattgaaaaccttctgaaagggatgcaccttctagatgccactaagaacatttatgattaattcatgtgaggaggtcaagaatctcaacattaacaggagtttaaaaggactggactccaaccctcacgaatgactttgggggattcaagacttcagagaaggaaggagccacagttgtagtgaaaatagcaagagaattagaagtggaagctgaagatgtgagtacattgctacaatctcatgataaaactgaacggatgaggatgtgcttcctatggattagcaaagtagtttcttgagacgaaatattctcctggtgaagaagctgtgaacattgttgaaataacaacaaaggatttagattattacataacctagccgggcgcagtggctcacacctgtaatcttggcactttgggatgccaaggcaggaggatcgcttgagcccaggagttcaaaaccaacctgggcaacataggaagacctgtctctacagaaaatttttttacagattagctgggtgtggtggtttgcacaggtagccccagctacttgagagcctgaggcaggaggatagcttgagccagggaggtcaaggctgcagtgagctatgatcacgccactgcactccagcaagggcagcagagcaagaccctgtctcaaaaaaaaaaaaaaaaaaaaaaagaatattacataaacttagctgataagcagcagcaggatttgacaggatagactccaattttgaaagaagttctattgtgcgtaaaatgctgtcaaacagtatttcatgctatagagaaatattttctggaagtaagagtcaatcgatatggcaaacttcaaactccagaggggacactgctgatttcacatccattggaaagacttctttttttttgtttattttttttgagacagagtctcactgtgtcacccaggctggagtgcagcggtacccactgtagctcattgcagccccaaactcctgggctcaagcgatcctcctgcctcagcctcccaaagcgctgggtttacaggcatgagccaccaaacctaggaagacttcttgcttttttttttttttttttttttttttttgagatggagcctcgctccaggctggagtgcagtggcgtgatctcggctcactgcaacctctgtctcccgggttctagcgattctcctgcctcagcttcctgagtagctggaattacgggcacccaccaccatgccctgctaatttttgcatttttagtagagacagactttcactatgttggccaggctggtcttgaactcctgacctcaggtgatccacccgcctcggcctcccaaaatgttctgattactggtgtaagccaccgcgcctggccaagatctctttctggacactctccatgggacatttgctttttcacttcagagatgtggaatttcttgttccaacagtttctagtcagtaaaccctgtgactatcccaggcatgccacggccaaccccttccatgaaacgcttctcatgagaatagatctgggatctggcggccgcatctcttcccacaggtaactcttctgtatgaccccagctccaatgctgtctcttgtcctcagaatctgtaatttattggccttactgattgcaactatatcatccttacaaggcccacaagagcccgggtgacaggcactggtgtccttctctggggttaaaggtgcatctgcatgtgtctccttgtggatcaaggcctccatttcaactagtagatgtgagacgtttgctccaatggaggacagggctccaggtcacctcctccctgcacatgggcactcggggctagcccagcctcctttcccagtgggctactttccagtctcactcacaatggctctgagtgactctggaaagaagacagttatggaacctctccctgtccaagtcattctgctgatagatctgcataactcatctcagcgaagcctggaccgccttgggaagattacctctgcctctgtaattcagacaaagaatatgaggcgcagaggctgtgaccacgcaggtgacccagccccgtctgcagtagctgggattgaagctaagttctcacattcacagggtgccatgagggcctcctgatctcaagatccaaagtgtggctggcatttccattaacattgacacacatatgtgtgagcattttgatgtgtaaaattttgccaagtgtctcacatattatcttttatcgtagtcacagaattctgtcttcctcgatataaatacttgtctttttagagttgattttccatagagccagcagctaaaatattccaaatgtgtttttcaccatggttgtttcattgttggaattcatgttccattacgtggcaatgcatctctctctgctgctctcccacctgagcagcagccaggctaacaatacgccgggggcacgtctcctcctgagcggcagccgggctaactatacgccgggggcacgtctcctccaagggaagaaaacacctggcaggacgtgacattctgaactgtgaggacttttcggggggaccaaagtttctgaaggtggcagtttgtgtctcagtctccatggggtccagaattgaccacagagcagaaggcaacagggagccactggattcacggggtggctttaacgtttaagctccgacataagaagtcacgccctccctgcgtttcaatgtccacaaataccataaaccacctgcataactgtctaggagtttcaactcatcgtccaacgtctagaggaaggtgctttcaaatgtttataatagatcaggtcaggatgtggactaggatgttttatcaattaattaattgattgattacaaaatgtaagtcttttaatctgaaatagggctggagaatttagcaaagtattatcaattccacatgagccttcaaagatcagttgtgccatctgcctctcagtaagcattggcatgtgacgtttctttcctaacatggggtttaatttcatttagctactgttccatccattcataatttgaaaatcattttgtctttagaaaaaccgtactactggccaggtacagtggctcacgcttgtaattccagcactctgggaggctggcaggaggattgcttgagaccaggaattcgagaccagcctgggcaacatggcagaaccccagtctctatcaaaaaaaatataaaaattagccgggcatggtggcgtacatctatacttcccgctactcgggagtctgaggcggggggatcgcttgagcctgggaggtcaaggctgcagtgagcagtgattgcaccactgcagtcatgcctgggcgacagagccagaccctgtctcaaaaaagaagaacacccacacccctccaaaagcatactattaccttttctattagatatctcaactgctgtacatattgctcaaagttatgacaaaaatctctcatgttgtgttgtggattccctgaggtgcagcctgcggtgtggccctggactcaggaaacccctgcagggaagctgtgttgcttgtccacgtgtgggcggggggaggtttccagccagacaggtgagcacctgcagcgacaccctcccgtccacacccaccctgccctgaccccaggcgagggccatggaatcacaggtaagtcttgtttactcggtcatcatctattcattcactgggctaattcattcataaattccattgctggaacctcataattccaaataacctaagcttccctctgctgtgcattgccctcaccacatgccttgcctggtctgttcattcttcctggagattccctgtccttgtaatgccattaaaatgtctaaactaggctgcttgcttataaaacagcaactcaaagtaaaaacaacaaacaaaactaggcttagatccaacaaatcacaactgttcaaaacaaggctaacaaaatgccgcagctcgttacgtctcagaaatgggaagtcaagaggcgaagggtgagacctgggagctgtccagctcctgaaaatacgcagcgggagactgaagaacaaagattccctacattgcagacaacgtgcctcttcccgtcgtaggaggtggtcagcagctgagagcacggggggcagacattcaggcttggggctcaacaagcctctgggaaaacacccagaccaaccctgggggctcacagacccccaaatccccatcaccaacgcggtccagaaggccacaggccacaccactgccgtgtgaagtcaaggaaacactgccttcttgcatcaggtcctaataactaacgttaaaagtttaaataatgtggccgggcacagtggctcacgtctacagtcccagcaccttgggaggccgaggcgggtggatcacctgaggtcaggagttcgggaccagcctggccaacacggtgaaactccgtctctactaaaaatacaaaaattagtcgggcatagtggcaggtgcctgtaatcccagctactcaggaggctgaggcaggagaacggcatgaacccgggaggcggaggttgcagttagccaagatcatgccactgcactccagcctgggcaatagagcgagagtccttctcaaaaataaataaataaataaatattgtcccactaaaagtaaaggtaatgacattttgaacttaggacaattttctcaggcagagttttacttttttgacttaagataaaatttttcaaagagtagcttagtgatccccacatacacagcacatagacttaacagccactaatattttgccatgtttgattcatgtttttgtgttatgaaatattgtaagttgcagacatcacaaaatttcactcctaaatacttcagtatgcacctataagaaaagtaaccacaacagtgggtgcggtggtggcgcctgtagtcccagctgctcaggaggctgaggcgggaggatcacttgagcctgggaggtcaagcctgcagtgagcagtaactgcaccactgccctccagcctgggcaacagaat[136 bp omitted]cccatctctactaaaaatacaaaaaaaatcagccaggcgtggtggcgggcgcctgcagtcccagctacttgggaggctgagcaggagaatggcgtgaacccgggaggcggagcttgcggtgagccaagatcgcaccattgcactccagcctgggcgacagagtgagactccgtctcaaaaaaaaaaaaagtacgtatgatttcctacaaaaccacaataacatattgtagctaacaagctcaaaaaaatttctgcctctcatcaaatactcaggagtttttcaaaaaccaattagcctcagaaggtaggagaaatgccgggccaggaggacatcgccatgggaaatgatatttacatggctaagaatctgagtttcctgtgagaaacaacggaaaaaataccctccttgtacaatgagagaaaatactatttttttccataaaaccataagggtgtgggcagtgtaaacctaaaattatgcacgagagcttccccatcgctctgtgtgggtagagaaacactccagcgtgtctgctctcttggtgctgggaatctgtgagaattcctgagcccgacacacagcgtctcggcttttctcatcagatgcagaccagtgcatgcatagtccagctgggcagcacagaaacagcgagaggccactggctcccaaaccaaagctgggcccttctggctttggaggaccctctggggatggctgtggtcagcacagctctttccttctctgctctcacagctgtggtgccggtggtctttgtgaagcacggagactcccccagtcaaggccaacggctggactcagctgcgtcatctccctcaccccgagcttcctctgctccttactcttcactggccgtcccaacacggccacctgccccccagcaaaccacatgagtcgtgtgcactgtagctgcgtccacagacttgccctcatccctcactgtggtcctggctttcaaggccattgcacctgggaggagactgaggtgttggctggtgtcagggcctctgcatctttcccatttgctcctgatccaagtgactctgtctgcggggtctggctgggaacctctcccccatccactgccagaggctcacattctgagcccagatacatcctggtagtctgcgtcctgggatacctgagctccttggccctgggaagcttcagtgtgactttcttggccaggaacctgtctgacacctgcgtggagccaagtccctgacgttgagcgagagttctgcagtgtctgggtcaccttccttcccatccgccaagggcaggtctcctccatcttggcccctagggtggggatcccaggctgcatctttgccccccgccctccccgcccagtgctacattaccctcaccgtaggctcaggcctgataggaacatcctgcaagggccggggaataagatacttaagttacccactttaaaaagacaaatttaccctttttactctccattgaaaaagtaagctctgtatgttccgtattcatttcagggcaaccagcccctgaattccctgtttcagaagtgtggcccccaggtgcacaggggttgacatgaacagaggggaggggttcgggccagagagaccagctttgggcctaaaggacacagggactggacgaacctgtggaaggggttcagaagggggctgaggcgtcagctccaggctaaaatcctgtgtgtggtccttcaggcctgacaacaggctctaccggcggacctcccagggatactgccctccccacccagactcaggccctgggggcgtccagccacctgctcactcacaccacgctctcagctcaagtgcctctattcagaagcctctactaggaacgtggggcaggggcctccccgagggaggctgggtccttcaacctgcagcagccttttgtttaggcccctctcagcagtgaaatgaccctcgtgtgtgctgatccacctgacccttgaccccagcactgtgctgggagaaacgcaaggggcgggttggcttctggcttctaccatcacagcaggtgagtttgcttgatagctgagctgcgctgagcccagcaggggagccctcggatgtgagaaacacagtcccagaacggccataaggaacagaagcactgagaccgtttgtgaaacaggtgccctattttactaaaaaccacatatacattacattttacaaaacagcaactatctgatctctcggtcccttccttaaccccataaaaagaaggggatatttggggaccgacgggaacaggttcccctccaaatgctgagggctacccaggcatctccagactcctggtccagtgcagggcagggggcagcggagcccgctcactgctcccatcagcccagggttcctggagcccgtccagagccctcagtgcctaaccagggctggagggaccacctgggtgggcctcagctggactcacagcagctccctgcctgggcggggtccggcctcaggaggaggagtgcgggtatccatagtggttgtggtcagcctcgcccagggtcaacgtcagtgacaggctgggcttccgttccagctcctcctccttcagacagtgctgtgggggtcgggctttgaagaagtctgagatgtagcagacctggtagagcagagggtggtgagaatgggcagggggctgtccaggtaccagggacatgggcatgagcaggagggggaggaacagggtcccaggtgggagcgaggggcctaggtgggaaatgagaggagtagtgcctggggtgggaagagagcgctcttagtggaggaccagtggggagcactgaggagctgacaggccccgggaagaactgcagtagggccaggggtccagagaaggactggggtgcacggaaaggagtcctgtgcactggggtgcaggggaggaatgggggcatggaggggggtccagggaaggactgggattggggggaaggggtcccaggggaggactttgggggtaatgaagagggtccaggtaaggactgggactggggagaaggggtccaggggaggactggggggaaggatggggtaaagggaaggactggggttgggggaaggggtcccagggaggactgacagggaggaggcccaaggaaggactcagtggggcaagggtacccagggcagcactagggttggctggggagtggtctctggacaacacaggggatagagttagggttagaagctcacagtgagggcagccaccagtgccccctgcaggaggccaacaaggacatcgctccagtggtgtttgtaatcagacacgcgggtgtagcccacgtagagggcaaaggccaccaggaagaactggactgtgggtcgcagcagccgtgcccacttccaacagagtcgtgcctgcacatacagctggagtggggagaggacgtgttagcctgtgcacctgccaggcgctccccctccccctgcacagacgtgttagcctgtgcacctgccaggcgctccccctccccctgcacagacgtgttagcctgtgcacctgccaggcgctccccctccccctgcacagacgtgttagccttgcgcctgccaggcgctccccctccccctgcacagacgtgttagcctgtgcacctgccaggcgctccccctccccctgcacagatggcagcactgaggccggaggcaaacactggtcagcccagggcctcccgtttttataaacaaatcagttagcccccctcaccaccactacccacccattttacagctggaaaaactgaggtccagggaagggagtgatttagccatggttcccccgaaaagcaagcccgggagaaacagactcaccgccaagaacaccatgcagtacatcccaaaggaagagtgtcccgagtagaaagacaacctgaggaaggagaaggggcaggtggctcactcagcgccttccaacctcccccttgtccccgccccgcccacagaagggagggctcgacacggaggctgctgctgttagatgcactcaaatcccagtagcagaaactgttccccttttctgttccagtcatctgataatggaataagagtctctgactggggctgtggcatgagatgcctcatccgtgaagactctgaggcctgaacccaaaacccagggcagacaatcatgtctggcaagcaggcaacaccacagtttcattttcaccatgtttcttttcaggattttctcccatctgcggaactgagggaagacttatttttatataaattcaagattcggtgaaggacatcaagaaaatagcagagcaagaaacttcaaaagcaatttttaaaaatggcaaaaaagtcacaatcaacttttttggaactactcaaaagcttgcagccaccagaagacttatcaagataaaccagctgaatctcagaacaaacggccttgtcgcattttaactcatcctggtccctctcccactgcctagactggtggtggcctgaggattccaagaacagactttatttgcaactgtggacgggagtatggctcaagggctggccttgatctcacctgactggacattctcccagtgctgaggtgctacctgggggatatttgtaggaaacattcacaacaaatttattattctctgctgcctggggccacagacagcagatgaggcaaacaacagactaaccaaacaggccagggaataaaatgctctgggcgatgggggcctggaacgcagacagagctgtgcaggagctcaggagaggcctgcgagggccgaagctaagctctcacgtctggccgccttcaggctccgcacacacaggaagcaaaagctaaggcagagttgaaaatgtgtttaaccgcggaagggctgaccccacatgcacacagacccttctacaaactctgggagggttttatgggtttttttgattccagatgtttaaggaaatctctgtcctatcactgaccactgggctaaaagaataggaagaaacggccatacgtgacaaaaaatacagactttacaaccagaaaagtcattaaacaaataactactgcaacaaacagcaagaacaaacccgggagagggcgtaggatcatatttccagagttgctacattataatattctaaacacccagtttaaaacaaagcaaaacaggccgggggtgcggtggctcactcctgtaatcccaggactttgggaggccgaggcaggcggatcacgaggtcaagagaccgagaccatcctggcccacacggtgaaacgccgtctgtaccaaaaatacaaaaattagctgggtgtggtagcacatgcctgtagtcccagctacttgggaggctgaggcaggagatttgcttgaacttgggaggtggaggttgcagtgagccgagatcgccactgcactccaacctggcaatagggtgagactctgtctcaaaaaaaaaaaaaaaattacaaggcatgtagaaaaacacaggtgtggccaatacacagggaaaaaaatgtaataatagaaattgtccctcaggacacccagatgttggacttactagacactttctaagagagggcctgacttgaacttctgggctccagcgatcctcctgcctcaccctcccaaatagctgtgacaacagttgtgtgccaccaagcctgggttctagacaaacacttttagttagccatttaaaatatgttcaaagaaaaaagtaaaaataaataaatactatgttcaaagagccaaaggaatatgagaacaatgtctcaccaaacagagaatatcaataaagagaaagaagttataaaaaggaaccaaataaagatttggttatctgaaatgaaaaatcacttgagggaggctcaatagcaggtctgaggaagcagaagaaaaaagacaatgaacttgaaaataggtcaattggccgggcacagcggctcacacctgtcatcccagcactttgggaggcagagacgggcagatcacaaaggtcgggagttcgagaccagcctggccaacatggcgaaaccccgtctctactaaaaatacaaaaattagctgggcgcagaggcacacgcctgtaatcccagctactcgtgaggctgaggcaggagaatcgcttgaacccaggaggcagaggttgcagtgagctgagattatgccactgcactccagcctgggagacagagcaagactccaactcaaaaa[144 bp omitted]tctacttaatacaaaaaattagctgggcatagtggtacacacttgtaatcccagttactcggcaggctgaggcagagaatctcttgaacccgggaggcagaggttacagtgagccgagatcgtgccactgctctccagcctgggggacaagagagagacttcgtttcaaagaaaaaaaaaaagattattcggctggggccaggtgtggtggctcacgcctgctactcaggaggctgaggcaggagaattgcttaaaccgaggaggcagaggctgtagtgagacaagatcacgtcaccgcactccagcctgggcgacacagtgagactctttctcaaaaaaaaaaaaaagaaaaggagaaaaaaaacattattcagc[138 bp omitted]atgatgaaaccccatctctactaaaaatacaaaaagttagtcgggcgtggtggtgcacgcctgtagtcctagctactcaggaatctgaggtaggagaatcgcttgaacccaggaggcagaggttgcagtgagccaagatcacaccactgcacactgcactccagcctgggtgacagaacaacattctgtctcaaaaaataaaattaataaaagtaaatgaaaatacaaaaattagccgggcgtggtggcgcacacctgtaatcccagctactggggaggctgaggcaggagaagcacttgaacccaggagatggaggttgcagtgagccaagattgcaccaccgcactccagcctgggcccagactctgtctcaaaaaaaaaaaagaaaaaaaaaaaagattatttaccctgaacgggctcagtggctcacacctctaatcccagcactttgggaggctgaggcgagaggattgcttgagcccaggcattcgagaccagcctgggcaacatggtgagaccctatttctacaaaaaaatttaaaaaccagctggatttggtggtgtatgcccgtagtaccagctacttggaaggcagaggtgggaggatggtttgagcccaggagttcaagtcctgggcaagatagcaagacccccatctctaaaagaaaaaaaaaattaaaagcaaaacaaacaaacaaaaaaagacagtaatgaggaattgaaaaaagaagatataacctaagcaaacctcaacgaaatgacagaggtccttccttatcagtaattacattgaatataaataaacactccaattaaaagtcaaagtttcattaaatgccttaattcaataaaaagattaatatataatttaaaaaacattaaaaaaaaagtcagagatctggctggatgtggtggcatacacctgtaatcccagcactttaggaggccaaagtgggcggatcgcttgagctcaggagttcaagaccagcctgggcaatatggcaaaaccccgtttctaccaaaaaaaaaataaacagtagctggatgtggtggcacgttcctgtagtcctagctactcgggaggctcaggtgggaagatggcttgagcctgggagtccgaggctgcagtgagctcagatcattgcactccagcctgggtgacagagtgagcctctgtctcaaaaaaaatcagagattggacaatacattaagaaacatggcccaatttcatgctaggtataagacacttactttacagtcagagacataaacaggttgaaagtccaagaatggaaaaaaaaaatattccatgcaaacaataacaaaaagagaaccagaatagctatgttaatatcagacaaaacagacatcaagacaaaaattgttgagacaaaactcatatatctcattctatgatgatgaaatggtcaatctttcaaaaatatataacaattacaaaggtaaatgtactaaacaacagaaccccaaaatacttaaagcaaaaactgacagaatgttacaacatggatgaacttcaaaaacatacaagaatgcactaacttatacaaaaattagccgggcgtggtggcgcacgcctgtagtctcagctgcctgctggctcttcatgatttggctccagggccttcttcagctcccattccccacaagagtgaaggctgctggtccacacccacctggcctcggtgacatcagcagggtttcccctgcacaccttctccagctgcacatagaccgagcagttgacccggctccagtcggggtcgcagacggctaggaagttgggcctcagacgcccaatcatgtacttggccaggtctgtcagagactggctcacggcagccccaaacaggaaggtccccagcaccttgtatacagcagccacgtagttgttgaagtccgagcgagaatagagccggtctgtgtacaccaggtaggcttccccggccgagacctgcaagagcagccgcaggaaccagtgggggtctcggtcggcccaggggccctcactcctccgcacgggcctccccaaggctgctggagagctggggactctgaagggggccctattacccacaggtaccactcagggcaaggctgtgtcccccggccccacacagacctccagggcagggctgtgccacccccccatcaggcccccagggtaaagctggccccaccccatccccctacccagtccctctgagcccctcctgccttacaaggatgacggtggccgtgatggtgaccccagccatgagcccgtgggtgatggtatctggacggtaggggtaccggatggagtcatccccgcagtaaaatcctcgcttgtacggggcgttcaccagcgtcaggatagcgaagggcagggaggctggtggggaagaaaagcctgggagctgtgaggttctctcaccagctgggccttggggccccacacacctgccttggcctggaggcctcccacctctactctcaccagacagcaaggaagagcttttttcacagcccaaataacactccctttcgcatcccctcagacaaacacaaactcctcaggcgctctgcccctcacatcctggcagcctcctttctgctccttgaactaactcagcaaacacccacctttgcacagccacttctctctgcccaaaatatcttttttttttaaatttttaaaagtagagacaggggtctcatgttgaccaggctggtcacaaactcctgggctggagcgatcctccagcatcagcctcccaaagtgctgagattacaggtgtgagccaacgtgccaggccccaaagtatctctaatttatgtgcggggccccaaagtagctctgagtaacctccactctcatctcccctgctgactgtccatgccagcatccctctcacagaaggaaaggtctgctctttttccctcttccttatgcaaacctcatgtggaatttggcagtcacgtgtgggacactggaattgatttccccccatccacccaccggcaccaggaggggcctaccgtattcagggcagagtccctggagcctgctcagggcctggccagggcagatgtttaataaacatcggttaaaataaggcaggacttcttttaacctaagagcaggccagagaagtcaggaagaagccaaggaagggcacagctgagacaccttcgctcacgcacttgccccttcatcgaccagccacgtggtgaccaggacagacccagccctggcctcagggatcaaagacacattcaggagccacttatggaaggtgctgccatggcactggggctcctggggccctgctgagctgagggtggccagggaagcaggagtcatctacggagaacggggcagagggcaggcgcacaacaaaagcccgggtcggctagcccagagacaaaccaaggcagggcatcctttggcccagcagggcaagtacaaaagggtgtggcttttctaagttctgaatgtcagcggaggggcagggagccccacactcctcccgacatgctaactccaagggccctaggacaccgtacaccttccatgctggctaagtctggggaaataatctggtgaagaaaacagaggcctgcctcaccgagcaagaaaggtgagggaatgcagaacagaa[137 bp omitted]cggtgtcccagctcctcgggaggctgaggcaggagaatcgtttgaactcaggaggcagaggttgcagtgagccgagattgcaccactgcacaccagcctggcgacagggcgagactctgtctcaagaaagaaaaaaaaagggcagcgccagggcctggaggcagggcaggacggcggagagggcgggatgtaagaacctgccttctgctcccacacaggaggggctggagctgctgtgaagggagaggccttggaggaggctcctgcagttgccggccgggtggaaagtcagggttacgagatgcccagaagggagtgcagcccgaccacagctcttatcgggcggaggctcacacaggttagcctccgtttccgacctccctgccccagcaactccaactagagacgcaggcacccccataacgacaggcgccgggcttccctcggcctggaaagctctccctggggtccccaaaacagacaccttctcttcatttagcccccgggagccctcccgccctcacactgccctcatgccagcatctggaacctcagtgttgactgaactgtggtgtgctcaagcttccagcatagaggtgcactcggcctggccaccacccctggcacacagcagcaacagccaaccccatctcggctgtacctcccgctgctgtgtgacctccggcaggtgactcagcacctccctcacaggctgttgtaagggaaatgtttgttatttgcatgttgcttagttcctggcatacagaaagtgccacctaaatgtttacataaataacaccataggtgctcaggaaatggtaccacgggctggcagacacccacagggacttcttgctgtcacctggcccaccctaaaaaagggtctccttccggaggtaagaggacttggcctctgctgtgagatggcagagaagcaggaaacacgttggggaggagggcaccccccagagatagaattccagggccattgtctgtgcagccacagagcaaacactcggcctttgttcccgggaccctgcgggaggggggcctcgggatgcccattccgccagtgtggcccgcaaacccgccggacaggtttggttctcctggcctcccggccccccgccaccccgttcacccgaagcctgggacccagccttcatccccagtgtctcccccgcccgagccagcagggcggctgggcctccccgcacgtgcacgggttcgaatcccgccgacgcaccgggtgccaggaccgagggtcagccctctccgcgcgcagcgggagcgcccaccccaggggcggaggcgcggacgtcctgccggggtaacccgcggccgcccccacctcccgggcccgcgtgactcacctcccaggccaggcggggcgggatggaggcgcgcgcgcggcccctccgcacagacttcctgctgccggggcgggggatgctggccccggctccccgggcctctcgcgacccccatccccctgggcctgggacgcggggacccccgagcctgggagggcgcgcgcagtgcggggcgcggagggaggtctggtcctcacgcgaggtccccgcctccagggtcctcggagggacgagggcgcgcagcctccgcgttcccctgcaaacttgcgcgcagccgggggcgtgtccgtcccgggagggtccccccaacacccgggtccccaaggctcttaccgaccagtaagcacagcacgtcgagcagcacgaagacccacctccgctgcatggtccccgcgacccccgacgccggtcccagcgcgtcccgtcgcgtcccggcccggccgcggagtcacgtggcgcggagcccgccccgcgcggagaggaggggaggggcgggaaggggaggaggggaggggcggggagggcacgaggggagaggtgaggaggggaggggaggggaggagggagggttaggggcggggaggggaggagggagggggaggggaggaggggagggctaggggcggggaggggaggggggagggggagggaagggaagaagggggggaggggaggagggaggggggacggcagcggcgggcaggggagcagcggggggggcggggcgcggcggacccgggaccgcgcggactctgcccccgcctggccgcggcgcccaaaagagcgggtggggcgagcgtgcgggcgccacggggacctcgtccgcccggagtcccggccctgacccgggctgtgcgggtctccgagcggcgtgaggtcctcagaggctggaggttccccgcgggtcgggccggcggagccccgggcggggacgtggagaaggaggacgagcagcggcgggaccggccccgcgggacggttcccgactttcctcctcagggagtggcagccgcgccgtgtgcgcctggaaactccgacagcaggaggcaccttaaagtggaaggggcgacgtggcttcatttcaggagtttcttttctcctaatactcaaaatcctggcgcgtccttggacccctggcacgttagaagctcgagttcctcggcacccaccttgcgacggcgtagggtgtccaggcgcagccctgtgcccaggcaccgttcctatcagcgcacttgctgtcccatttcacagaagagcacgggggcgccaggagctgggaaccccatgaaatggcgccggggtctgtgcccccaccaggtcgtggggagccctgagctgagggtgcctggggattgagggcacctgagccagggaaacccaggcccaagggacccacactgggtcctttcggctgggaccatccgggaggcctcaggagtgtcagacccacgtttccggagtccagccttgacctctgccactcacggtcacttaaatgggaagtggcaggcctggggtcagaaacaaggctgctgggccccagatccgctgccaccctgaccctcctctaaaacccgttcagcaccaccatcagccccctgccccagcaacaccaaaacagggtgcgtctcagcaactggacttcaactgggagctcctcgaccctgcttcccggatggtcagacacctgcacgtggggcaggggggcatcatgagggaactccaagggcaaggggctcttgggagacagcaaaggcacccagagtggtgctgggtgggaagacggtgcaagctgacctgtggccctccaagggcagggttgaggtgctcccttgctgcactcacggtggggtgggggggctctagctcccgtcggaattaggattgtgagggttctggtgcctagcatcaatgctacataaatgtagggttcagcgtcactactgcgctttcccccacacttcaccctgtctgcaaatgagtgaccactgctgtcagtgtagtcttgacagccaacgcacattttctcctaagatggagagggtgcaacatctactggagtcaaggaaaggcggtgttcttcattgagcacctactgtgtgctggggagcaagggagaggtcacttggaggggcctgccaaagtgggagcggggggaagacagtgggggctgtgggatggggccaagccaagagggagagacccaggagaggggtggaggtagacctgggaggatagagggtggaggtgaggctgcaggctgttcccccttccatccttccccttgggtcaggatttgggttagcccttaaaatccctgggcaggataaggattaaaatctggtggggaaagcaagaattaggattagggtcaggattggggtcgtctcctacatatgctgactgcagcccaccacacttcaaggaacttcttgtcacggctttcatagctggatctgctgctgcccccagctgcctggtcctcccttccaggaagaacctgaggccagggcagctcccagcagggacagagcctggcctggaggccaggcctcagtggctttctccttcacctgcaaatagcagagctggaagcgggtggtggtacatgtacccaggctgggtcccctagagacaagcaacccctgagggccaggtcgccactcccaggcaagcaagctcacgggttcagcaactgcagctcccgcctcttgcccagcactggctctgccaccttggtgcctcatcgcaacctggatggctccgggcctgtttccaaatggactctatggagactaagacacctgtgaagtgggcagaagggggcctggcacacagtaggtgccacctaagtgcagccagccactatacctgccgttgctttctctgcttctctgggacttgagaggtgaagtaccttgcccagagtcaaaacgggagttgtctcccaggttcctggcacggggctcttggagtcgaacgagtgcccgtcagtgggtttgacgtgcaggcagtgggcagggaaggctgagggggtggatggtttggaaagacatctaaggtatccctcagtctctgtctgcataaaggcggcaagacagtagctaccacctgggattgtagagaagattaaatagtttgtgaaatgcttgacccagggccaaacattaggaaacatcatttgagggttaattgaacaaaatacagtgtgggtaggtatcacgtgtttgctgggtcaagatgtagaaggtacttcttcctggggtcaagatttaaaagggttggaaaccgctgccttcaaattcacaatccaggacccacgaattcaaaattcccctcggactttgcaatccttggagtgcctcttaatttagtgtaaccttacagtcagtcagggacagggtaaccctccgggtttcagcaccgcgagtctgctgtgctctgtctgtgaggaggtcttcactgggtcacagcaaagaaaaacacacagcagtagtgctggacgtggtcgccagagcccctcgcgcagacaagccgggacgcggcccccctgccagagcccctcgtgcagacaacccggaacgcacagcccctcccaccatctcagtctgtgcgttcgttcactgtccccgtctcctcccacgagctccaggaaagtgggagctggcacacagtgggtgcgcaagccgtgcttactgggatgcccagagcctgaggtcaccagggagctgacagctgcagggagctctccctgggtcacagcaaggcaagacacacaagcaacagcggagggcaacagtgcgttctcaaagggagagctggtttccgcctgcttctcgtacaaaacgaggggcagagatggcaggggccaccccgcgaaacactcgattaaatccccgttcacaaaccttcctgatgcctggcagccctatccctgcccccgaaaccagcatctggtgaaggcaaggagaggcacctggaagacctcaaatctttgcaggtctgcaaagccactgagcacccacagaccccaaggacctggttccgactcaaggaagaacaaggacggtggtggcggaggggctccagagaactcgtaatgcctctggtgaggccaccgccgtcctgcatctcttgatgtgactggtgacagcccaccagggcggggaaccggttcacctcccaagtgctcaccgggggccgcgctttcgactctccctgcacaggccgtgggtcgtggctccgggtgagtggaaacatttgccccgcagcgaccaccgcccctccctccccgacctcgagccacaggaccaggggacggggctgggctgcgctctgggccccgcgatgcctccgggaggcacggccgccctctgctggacacgccgaggaggcgctccacgccagggtctcaacatcctcctgagaacagcccagcaatggggcaaataaacatcaaggaccccctagctgagtcctgatacctgtgaaacaaacaggacaccccgttacatttgaatcccagaagagcaacaaaccggttttcagtatgtgtcccgaatactgcatgggacatacttacacattcgtttatctgtaatccgagcccaactgggcatcctgtattttatctggccatcctacccaggaactacaaaccgagaaaacaaggaccatcagggagagagaaacagctgggtcaggtcagtgggggcccagacagcgccagtccagggcccggacatcttcaacaaagcctgggcctgggaggctgaggctctggggaccgtggccggtccaggaccatcagttctgagcgactttctccctcccccacttccacccccacagaaattgtctcaggagggctgatctccaggcaggcccctggctaacgcctgcttcctggcacggccatggactctgtccagaacagatttccatatttggttagcaggtaggaaggaggtcatcaaagaccttcacttcactgtaaaaggaaagcattaaataaacgaacacaaatgacttttatttatggctgccgaaaagctgaggacagtaagtttgttctagagaggtatgagctcccctgaggttagtcaagaccaagtctggtggaggcctcattagtcctaggagcctggtgtcagacaaatccggaagagccccaaggcacagcgggccctccaggtcctcctgcctgggtctgggctgcaggaagggcaggattccaccaccccacagctaacccagaggcaaagctacgctacacaagcggtgagcaggccagcccagctcctcgagaccagcacatcaacccagctgctgacaggagaggggcaagcccttcctgaggcaaaacagtatcccctctgctccttaactgtcttacccacatctagtgcaccctcagaaacacaagacaccatggacaagaacagaatattagtcaacaatggcatcccagggtctctcccagctccaacctatcttagatattccagtcaaatccaatctccctaaagcgtgactctacttcagctaaaaaacacactaaggctccccactgccttcccagtttcagatttcttggcctaagagggaagttgttcctgcactgccctcctgacctctgtgctcaccccacacaaatgggacgctcatgcctctgggtggctgcgcccggcctgcccatgtgctcctccctcttactattccttctccatggggcctgccctgctaccgaaggggaacaagggaccctggcctggccaaccaggaaaccccttctgctcggcagttcctgattcagttatgggcacgagacccaagaacaaattttacccaggagttttgttagaacagttgggcaagatacaggcttcccacagaaatcacagatgtaaggttgtgtgcctggagcttctggtgccatctcagtcgccacaaagggcgctgcccctgagaagaaggtcagttcgggcagcagagaaatagaagcaccgaaacatcataatgtggatggtgactcctgattcctgtttctggaggccctggcatccccggactgggtcttaagagtataactttcgggctgggcacagcggctcacgcctgtcatcccagcactttgggaggccgaggagggcagatcacaaggtcaagagtttgagaccagcctggccaacatggtgaaagcccgtctctactaagaatacaaaaattagccgggcgtggcagcgtgtgcggtgtggtggtgtgcgcctgtaatcccagctactccggaggctgaggcaggagaatcacttaaacctgggaggcaggggttgcagtgaactgagatcacaccactgcactccagcctgggcaacaaagcgagacg[153 bp omitted]tctactaaaaatacaaaaactagccgggcatggtggtgggtgcctgtagtcccagctactcgggaggctgaggcaggacaatatcacttgaacctgggaagtggcagttgctgtgcgccgagttcacgccgctgcactccagcctgggcgatagagcgagacctcgtctcaaaaaaaaaaaaaaaaaaaaaaaagcaaagcaataggatgacaatgatttaaagtaactattattaaaaggttaaagattacagaagaaaagataggggcaaggtgagaaaatggagaatttcagcagaaaaattaaaaacacataagagcacctattaaaatatacaatatgggaaataaaaattttgtgaaacagactaaatagaaatctggaatatcagaaaagaggattggtagcatcaaagacatgtcgatagaaattattcagaggccgggcacactggctcacgcctgtaatcccagtactttgggaggccgaggcaggtggctcacgaggtcaggaattcaagaccagcctggccaatatggtgaaaccccgtgtctactaaaaataaaacaaaaattagccgggtgtggtggcgcacacctataatcccagctactgggaaggctgaggcaggagaatcgcttgaacccaggagatggaggttgcagtgagccgacatcatcgacatcatgccactgcactccagcctgggtgacagagcaagactccgtctcccaaaaaaaaaaaaaaaaaaaagaaattattcaaacagaagcacagagagagagaaaaataaaagagagagctgtgaggcaacaccgagggttgtaacattagtgactggagagactgtgggtcacccatggccatgacaccagtgactggagagactgtgggacacccatggccgtgacaccagtgactggagggactgtgggtcacccatggtcgtgacaccagtgactggcgagactgtgggacacccagggccgtgacaccagtgactggagggactgtgggacacccatggccgtgacaccagtgactggagggactgtgggacacccatggccgtgacaccagtgactggcgagactgtgggacacccagggccgtgacaccagtgactggagagactgtgggtcacccagggccgtgacaccagtgactggagggactgtgggacacccatggcagtgacaccagtgactggagggactgtgggtcacccatggccgtgacaccagtgactggagagactgtgggtcacccatggccgtgacaccagtgacagtgactgtgggacacccatggccgtgacaccagtgactggagggactgtgggacacccatggccgtgacaccagtgacagtgactgtgggtcacccagggccgtgacaccagtgactggagggactgtgggacacccagggccgtgacaccagtgactggagagactgtgggtcacccatggccgtgacaccagtgacagtgactgtgggacacccatggccgtgacaccagtgactggagggactgtgggacacccatggccgtgacaccagtgactggagggactgtgggtcacccagggccgtgacaccagtgactggagggactgtgggacacccagggccgtgacaccagtgactggagggactgtgggtcacccagggccgtgacaccagtgactggagggactgtgggacacccatggccgtgacaccagtgactggagggactgtgggacacccatggccgtgacaccagtgactggagggactgtgggtcacccagggccgtgacaccagtgactggagagactgtgggacacccatggccgtgacaccagtgactggagggactgtgggtcacccagggccgtgacaccagtgactggagagactgtgggacacccatggccgtgacaccagtgactggagggactgtgggtcacccatggccgtgacaccagtgactggagggactgtgggacacccatggccgtgacaccagtgactggagagactgtgggtcacccatggccgtgacaccagtgactggagagactgtgggtcacccatggccgtgacaccagtgacagtgactgtgggacacccatggccgtgacaccagtgactggagactgtgggacacccagggccgtgacaccagtgactggagagactgtgggacacccatggccgtgacaccagtgactggagagactgtgggtcacccatggccgtgacatcagtgactggagagactgtgggtcacccatggccgtgacaccagtgacagtgactgtgggacacccagggccgtgacaccagtgactggagagactgtgggtcacccatggccgtgacatcagtgactggagagactgtgggtcacccatggccgtgacaccagtgacagtgactgtgggacacccatggccgtgacaccagtgactggagagactgtgggacacccatggccgtgacaccagtgactggagagactgtgggacacccatggccgggacaccagtgactggagagactgtgggacacccatggccgtgacaccagtgactggaggctgtgggacacccagggccgtgacaccagtgactgcagagactgtgggacaacacccagggccgtgacaccagtgactggagactgtgggacaacacccagggccgtgacaccagtgactggagggactgtgggacacccatggccgtgacaccagtgactggagggactgtgggtcacccatggccgtgacaccagtgactggagggactgtgggacacccatggccgtgacaccagtgactggagagactgtgggacacccatggccgtgacaccagtgactggagggactgtgggtcacccagggccgtgacaccagtgactggagagactgtgggacacccagggccgtgacaccagtgactggagggactgtgggacacccatggccgtgacaccagtgactggagggactgtgggtcacccagggccgtgacaccagtgactggagagactgtgggacacccatggccgtgacaccagtgactggagggactgtgggtcacccatggccgtgacaccagtgactggagggactgtgggacacccagggccgtgacaccagtgactggagagactgtgggtcacccatggccgtgacaccagtgactggagagactgtgggtcacccatggccgtgacaccagtgacagtgactgtgggacacccatggccgtgacaccagtgactggagagactgtgggacacccatggccgtgacaccagtgactggagagactgtgggtcacccagggccgtgacaccagtgactggagagactgtgggtcacccagggccgtgacaccagtgactgcagagactgtgggacacccatggccgtgacaccagtgactggagactgtgggacacccatggccgtgacaccagtgactggagagactgtgggtcacccagggccgtgacaccagtgactggagactgtgggacacccagggccgtgacaccagtgactggagagactgtgggacacccatggccgtgacaccagtgactggagagactgtgggacacccatggccgtgacaccagtgactggagagactgtgggacacccatggccgtgacaccagtgactggagactgtgggacacccagggccgtgacaccagtgactgcagagactgtgggacaacacccagggccgtgacaccagtgactggagggactgtgggacacccagggccgtgacaccagtgactggagagactgtgggacagcacccaggacagggcacatgtaccaaagacccaaaagacagagtgggacatcagaaaaatttgagaaatactccttcagaaatggaactctaagaaagcaaaagaaaacagaaatatctgcagaaataacagtcaagacttcaaaatctgttaaaatgcacccaccctcaggtcgaagtagctcagtttagaaagctagacccaggtgcatcacaaacggccaaagtccaaaaataaaagaaaatcatgtatatagtcagaagtaagagatttcacagtaaggaaaacagaatgagaaaattcctcatcagaacagtagaaaacagcatgaatagaaccaccttaacatgcgcagagaaaaacacagtccacttagaaccgtatatcctgtaaaaatgcacttcaaaagaggaggaggaattagggccttttgatccacgtaagagctaagcctaggcagaatgtcactgcagaggaactacaaggcaatatatattaaatacggcacttcagactcaaagaaaattatccctcttggcaacacggagtctgaatgaagaacttaagagcgccagaaaggtacgaaaatgtacacatcttcaaaggctatggaaaacaagatcccactacacacctattcgaatggccaaacacaaaatactgacaccaccaaacactggggaggacatgggcctcaggagcgcttactcattgctggtgggagtgaaatggcagcttctcattaaacacggtctcatcacacggtccggcaatcaggtttctttattcatccaaatgggctgaaaagttgtgtcaaaacaaaaacctgcacatgggcgtttacagcagctttatgagtaactgctgaagcttggaagctgctaagatgtctttatgtgtaactgccaaagcttggaagctgctaagatgtctttacgcgtaactgccgaagcttggaagctaagatgtccttcaataggtacgtagataaacaagctgcagcacacgcccaggatggagtatcatccagcgcgaaaaagaaatgagccatcaagccacgaaaagacatggcgaagccttcagtgaatatgaaagaagccaatctcaaaggctacatactgtacgtgtacaccaaagcacatcctcatcagacacctcaatacaccaaagcacatcctcgtcaatacaccaaagcacatcctcatcagactcaatacaccaaagcacatcctcatcagactcaatacaccaaagcacatcctcatcagactcctcaatacaccaaagcacatcctcatcagactcctcaatacaccaaagcacatcctcatcagacacctcaatacaccaaagtacatcctcatcagacacctcagtacaccaaagcacatcctcatcagacacctcaatacaccacagcacatcctcatcagactcaatacaccaaagcacaccctcatcagacacctcaatacaccaaagcacattctcatcagacacctcaatacaccaaagcacatcctcatcagactcaatacaccaaagcacatcctcatcagactcctcaatacaccaaagcacatcctcatcagactcaatacaccaaagcacatcctcatcagactcctcaatacaccaaagcacatcctcatcagactcctcaatacaccaaagcacatcctcatcagactcctcaatacaccaaagcacattctcatcagacacctcaatacaccaaagcacatcctcatcagactcaatacaccaaagcacatcctcatcagactcctcaatacaccaaagcacatcctcatcagacacctcaatacaccaaagtacatcctcatcagacacctcaatacaccacagcacatcctcttcagactcaatacaccaaagcacatcctcatcagactcaatacaccaaagcacatcctcatcagacacctcaatacaccaaagcacatcctcatcagactcaatacaccaaagcacatcctcatcagactcctcaatacaccaaagcacaccctcatcagacacctcaatacaccaaagcacattctcatcagacacctcaatacaccaaagcacatcctcatcagactcaatacaccaaagcacattctcatcagactcaatacaccaaagcacattctcatcagactcaatacaccaaagcacatcctcatcagacacctcaatacaccaaagcacatcctcatcaatacaccaaagcacatcctcatcagactcctcaatacaccaaagcacattctcatcagacacctcaatacaccaaagcacatcctcatcagactcaatacaccaaagcacattctcatcagactcaatacaccaaagcacattctcatcagacacctcaatacaccaaagcacatcctcatcagactcaatacaccaaagcacatcctcatcagactcctcaatacaccaaagcacatcctcatcagactcaatacaccaaagcacattctcatcagacacctcaatacaccaaagcacatcctcatcagactcaatacaccaaagcacattctcatcagactcaatacaccaaagcacattctcatcagacacctcaatacaccaaagcacatcctcatcggactcaatacaccaaagcacatcctcatcagactcctcaatacaccaaagcacatcctcatcagacacctcaatacaccaaagcacaccctcatcagacacctcaatacaccaaagcacattctcatcagtcacctcaatacaccaaagcacatcctcatcagactcaatacaccaaagcacattctcatcagacacctcaatacaccaaagcacatcctcatcagactcaatacaccaaagcacatcctcatcagactcaatacaccaaagcacatcctcatcagacacctcaatacaccaaagcacattctcatcagactcctcaatacaccaaagcacaccctcatcagacacctcaatacaccaaagcacatcctcatcagactgctcaaaaccagtggtactgaaaaatcttcaaagcagttggaggaaaaaaaccaagagaggactgaagatttcctgctggaggcagggcaagctggaagacagaagaccttgcacatctgaagaaaacgtcagcaggctgcggcgctccaatgaaaactcctctatgcccatccccaaacacccaggttgccgagtggctggccctggttctcacagctcctggcacaggctcaccagcaagacccctgactctcccacacccatcatgcaagtggtcctggtccttcaccaatagtccctgaggccaagccacagtcacctcccagctgggggccggccctccccatatcccatcaccatgcatgcccacatttccctcactgatgtggacaatatgcaacccaaccagcctgcac[141 bp omitted]ccatctctacaaaaaatataaaaagtagctgggcatggtggcgggcgcccgtaatcccaggtggcgggcgcctgtaatcccagctactcgggaggctgaggcaggagaatcgcgtgaactcaggaggcggaggttgcagtgagccgagatcgcaccactgcactccagcctggcgacagtgtgagaccctgtctaaaaaaaaaaagcaaaacaaaacaaaaaaacaatgcagacctaaagtggcttccacaccaagaacaaaacttggcctcatgacctactgtccccaccccgcccaacctctgccctctgtgccctcagcttctcctggagacccaggcctctgtcctctgcatctgctgtcacgcctgccaggcctctcggcaaactttcagcaaaggaggcccattctccttcatgtttcagcttaaatatcacttctaggaggctgccccgaccacctctacccagacgtgggccctcctcacatcccgtcatcgtggccacaattcccttactgacgtgaacaatacgtagcccaccacgtcatgcccccggtgcaccccctcgcccgtgttgctcacgacttatcctggaccctccaagagacatgcaggcccccaagtgagatgacgaggacacctgccgccccagcccccacccgatccaccacaaggcaccccgggcttcaaatcaagtttaataaataaaacagcaaaggggggttcaaggcagttatcacttcacagtgtggtccttggtggggtgagggatggtcgagtccaactcggaaaggggctcgagcacaagaggccggacgacacccggggcagggcgcgccgccgcccacggaggaccccactccaacgtgtaaacagaaacagaaacgaacgagagggccagggaggagggggaccaggactccaagccatcttgctaggaagcttcccacagaaggaagacctgcagggctggggaaacaggctggagtctggcccctgcgtggccagcagggccggctcctccggaggctccctgccttggtaccgggggaggacagcaaaggggatgtaaatcacctgtctcctcaaacccacgcctggggttgctgagggaccccaccccaaccgctcaggatcggggagcagggatggagggggaagaggcaggtgggggtgtaaagtgcggcttttcctgaagtggagacgatggggtgggaaggcgaggctggggtgggggccggacagcgaggtatatggctctgtgccccacggggttggcactgagtagcagctgcccacgacccccagggctggggcagcccgcggccctgccgggtgtggagagacagagccaagcagggagctgagggcgccccggcggaggctgctggtgcggggcagggcgtcctgcccgtctccccgccggggcagtgacgccttccctcgcctctgctggctggaagggactaggtggccggctctgccctgcgtcccaacggcggggtctcttctgtccccggctgcccgacggatcccacgtgcaggcagcggcccggacccgggtggcagtgccgggcgctgacggcgctgggtggggccgtgggtccattctgtgtggacaggggcaagggctcacggcccagccacctcaccccagtcctgacgtgttctgaagcagaaggaggtgctaccccaaggcccggggggtggggaaggggtcaggaagactgacagaggcgggcccagcggcagcgctaagtccagtctgggccgcatacgccgcccgcggccaggagtcagcaggtcatcacgttacagctgcaggggagagaccaagagagacgcagagagtgtcagtgcggccccacgtgcctgcacagcccagtgctgagcgctggactcgagactcccagccttgcctcccccacagcctatggcagccgggcccggggtgccctgaggggagctggtggctggagcaggggtgggacagcctggcacctgctcccatttgtggagaatgtggaccacatgaatgtattctccagtcaaaaaatacatacaagtaaagaataaacctaaagacacactgagagcctgctcgtggagccacactgtcctcgggtccttggggcaaatgcctcccaccctcctctgctcagcctgagggctggggggacctggttggagtgttgcggaggctccgggcatggggtggcactcactgtgacaggggctccgagtgtagcccgggggccgggcacgtggggtgggcggccaggaaggggttcacgtccccaatgccgatgagtccaaactcggtgaccgacaaagccacctgtgctggggccacagtctcctccggatccccgctgaggtccacatggctggagatgaggggcagctccttgggcagggcgaagtccacggccagccttgggctggcgtctggctccggagcagtgacagctggctggtatgaggctgggtcggccagggctgggggccgatgggacaggggtacagcgggggactcatccagctgctggaaggaacacggccctggctccgaggacgggagtccatcagaggccactccgggctcatcgagaccaccggccgtgccatccacgctcagtggatctgtgaaagagaacgcaacagagggtggggcctgcccacagccgcggatcctgtgcaggctcctgcctaactttgctgggtccagcaaagcctgtggatccctccccagaaaagcctccacacaaatacaaaagacaccagttacactgaaatccgcgagccccaggttaagggtctcagctttagaagtagattttagttcatcagaccaacagtgggtcacaacccacatctttaaaaagagcagaatacaatagacataggtgtaaacaatgccgggggcactgcagagggtaaatacagggtctgtggaatacacagacttaggtgtaaacaatgccgggggcgctgcgagggctaatacagggtctttggaagttttgttcccacaggcagcgcaaggggcctcaccacaattctaggaagtagccgaggtggacaccctttggcaaacaaaccatggaaacaaccagactctggaaatgggggaccctcccagactcaaccatctaaacacagagccagaaagcaaaggatcctcgtttgcaccctccccgtgtgggtctccaccttcggacgccacatcagacaccaccatcggacatggtccctacccgaggccctgctgtgctccgtcatggcctcaggtgcaagatcctggcgacggctccggacaccctgtccttcctgagtgtcctggtgacgggctaagtccccaccctggggcaggaaggccctccccggagactgaggcctggtaaataccccaacctcaccatacggggctccccagcagtggggccacatgcacccctccagcaagcccagagggtaagcgtaatccctgccctcccctctcccagccaggtgtacagagcggcatccacatcacgtggctgccctccgccacccagacgcccactcctcctggcgaggctggcccagcacagggcgccaggcaggagaggctccaccgggcctcactcacggctccagacccgtggccgcccccagggcaggagatactccccaagcctcacctgtgcgcatcccagtcagggtgtcttgctccgggcgcggacggccggggccatcggggtcgctgccatccaggtcctggtctgcgtccctgtggggagagggcgccatgaggggcggcagacaggacagacgcccccacccaagaggtgccgcccaggcgcccacgtgcccacccccggcggggtggccgcctgtcgttactgctggggagggctgcacgcacgtggttccggacgggacgtacttcctccggcccagccgcgtctgctgggcgaagtagtcgtagcgctccgacttcttccacaggtagtagtactcgacacactcgcccactgaccgtgtgcgcacctgcggggaggggtcaggagccatctctgtccccggctgcccagccccagcacctgcaccacgatcccaggacgtcctgggaccccgggacagcacagaaggagcacagcacccaccactctcagataacgcaagaccccccgacccatgaccctaacaggccacaggctatgcccaccacagggaacaggggctcggagcactgtggcactgcctcctgtttcaagccccctcagagccctccagctcctggcttgagacccctttcccttctgtagcatcagccagacaaacgtaccctccaggcctctgtctactgctcacccaccccatcccagaccatgagccacgggccagttgcgtccacctcatctgcctgcttctcacaggcccggggtgggagtgggagtgacaacccccgggtccacagactcctggactgagccccttccccgggaggaagaggcacaagcccgcggcgcctgctttcccaccgaacacatccctccagggcccagcgaatgcttcccaagtgcacagaagacaccgcagaaggacacatgggttctgtgaacccgacaaaattcccaacgtagcacataaagggccaaacacacatgcacacaggcttcagggagacgagaagggacacacacacacacacacacaaggcttcagggagacgagaagggacacacacacgcacacaaggcttcagggagacgagaagggacacacacacacacacacacacaaggcttcagggagacgagaagggacacacacacgcacacaaggcttcagggacacgagaagggacacacacacacgcacacaaggcttcagggagacgagaagggacacacacacacacacacaaggcttcagggagacgagaagggacacacacacacacgcacacaaggcttcagggagacgagaagggacacacacgcacacaaggcttcagggacacgagaagggacacacacacacacgcacacaaggcttcagggagacgagaagagacacacacacgcacacaaggcttcagggagacgagaagggacacacacacacacgcacacaaggcttcagggagacgagaagggacacacacacacacgcacacaaggcttcagggacacgagaagggacacacagcaagtgtgttccatgtggcacctggcacagagctgggcgcacacctggcaacacctccaacatctccacccgggaggctcatcccacagagagcttgaggctgtggccactgctggtgatggcggaaaagaccccctcacctggacatgctctgggccaactaacccaccgccacccagaacgaggatgccccatgctcaccgctgcgagaacaacgtggggtcctgcctgggggcgagaccgagacaacctccctgcagggcaaacctcaaacgcacgccacgagggagctcttctgtgaagggccagggtgaaatacgcactggctcaggctgaccaacgtgtgctggctacacacggcccctcgcggctgggccaggacctgcccggagctccagaaacacggccgggagttacaaaaacgcggccctgagctatagaaacacggcccggagctgcagaaacacggcccggagctatagaaacacggccgggagctgcagaaacacagccgggagctatagaaacacagcccggagctatagaaacagcccagagtccagaaacacagcccgaagctccagaaacacagcccagagctatagaaacacggcccggagctataggaacatggcccggagctgtagaaacacagcccggagctacagaaacacggagtccatagaaacacggcccagagtccagaaacacagcctggagctgtagaaacacggccaggagtccagaaacacggcccacaactccagaaacacggcccggagctacagaaacttgacaggggctccaagtgtagcctgggagcaccacactccagccacacctcgccccgctgtctccaatcaaaacaccacgtggtgctggagtctgacaaggacagtccatcgctgctgcgcacggcaccgcacagtcacctgagcaatgtcctgagccgtacaaccagccccgggcaggtgcctcctcacccaagcccttcagtggacgacatcgggccccaaatggagcacggtcccaggacacgaggcagaagcaaggctcggcaacaaggccacagcccactggtcctgaagggactcagtgcccaaccggggcgtggacagaggcggagaagccactggtcagagccatgggaaggttttcagccagagatgtctgactgccaagaggctggcttggaagttaccactcaagaagccacagggcagagggcactgctgcagacatgcagagacccacagaggacgtggggaaggtctaaggaagggcagaaggccccggcacttggcagcacctgcctgtcatgagggtttgtcccgggtggcaggacctgggtccctggaggagggaaccaggagacccctggtctccaggtgtcaggggttctgctgtggggccaatgctggacactgagccagcaggctctgctcagaggacacagacttgaagatgaggtgcccagggccctggggtggaatgtgaggcagaaacaactactagaattcagcttttgccacattctttcccaaagccagagccttgttcttgtggggacaggaaaggggcccacagcagtcagtagcaaaaaatgcagaagacagcaatgggcacacggtgaggaggcggacacaggacacggggctccaggcctccagtcggccgtgtgctgtgtgcctgcggaccctgagcccctccccagatcgagaagcccccggtggagcctggcagtggagtccgcaccttgttggcctggatcaggtgaaagttctttccatgcacacggaagccgtgctcaaagttcctgcactcctcttcactccaagcacagagcccatctgcaaacacggccggggagaacggtcagtggtgcccagggcggggccgcagcggaaggaaggcccaggccggggagaacagtcagcggcgcccagggcggggccgcagcggaaggaaggcccaggccggggagaacggtcagcggcgcccagggcggggccgcagcggaaggaaggcccaggccggggagaacggtcagcagtgcccagggcggggccgcagcggaaggaaggcccagaccgctgctcacctcggatcaccttcacgttgaaccgcagccttcgcagggcctcctccacattgaagttgcatttcaccaactcgtacagcgcctggggagaggacatgttggctcttccatgggctcagcgcaggagccgacagcaagaactgtctataccatccagcgagtggcatcaggggccgtccacaccaccctcctgggcgatgtcagagccacctacacctctatccagggagtgacatcaggggccgtccacaccaccctcctgggcgatgtcagggccacctacacctctatccagggagtgacatcaggggccgtccacaccaccctcctgggcgatgtcagggccacctacacctctatccagggagtgacatcaggggccgtccacaccaccctcctgggcgatgtcagagccacctacacctctatccagggactggcatcaggggccgtccacaccaccctcctgggcgatgtcagggccacctacacctctatccagggagtgacatcaggggccgtccacaccaccctcctgggcgatgtcagggccacctacacctctatccagggagtgacatcaggggccgtccacaccaccctcctgggcgatgtcagggccacctacacctctatccagggagtgacatcaggggccgtccacaccaccctcctgggcaatgtcagggccacctacacctctatccagggagtgacatcaggggccgtccacaccaccctcctgggcgatgtcagggccacctacacctctatccagggagtgacatcaggggccgtccacaccaccctcctgggcgatgtcagggccacctacacctctatccagggagtgacatcaggggccgtccacaccaccctcctgggcgatgtcagggccacctacacctctatccagggactggcatcaggggccgtccacaccaccctcctgggcgatgtcagagccacctacacctctatccagggactggcatcaggggccgtccacaccatcctcctgggcgatgtcagggccacctacacctctatccagggagtgacatcaggggtgtctacatccccttgcaggatacccggaggcgtctacacctcctccctgatacgtggttttaattggccccccttctgacctgagtagctgttccagtgccctggcccccacacacctgacccctgccctcccctctgccctccctggcccctggaggcactggggtgtgagctctggcccacgccacggcagccctcagcccctctgtccccggcatggcagcccccacctgctcactgtctttcacggcttctccctctgggagctgaggcccggccatctcgtgccaacgccgcttcaccgccctgtacaggaactcctccacctccctctcagggaggacgctggggtcccagagcagctggtcttcgttctcgtagactgcacaagcagagggcaaaggtcagcttgcaggaacccaatctgcacccacacacgccaggacaagcaaagcagccaactcagcccctgacagggaggaggcactgtccgtcctccctttcccaagccctgggccgccatccctgtgctcctcctgggcttggtgctgctgtgctcaattcaactaccgagtgggtccagagcaggctctgggcaccacacacaggcctgtatcccaacgaccaagtgcagggagccatgagcagtcagcaggggcgcctgatccagccaaggggtcagaggaagctgtggacagcctagatctggggcaggggaattctaagcaaggactctgcagagggggttctaagtagtgagaccagtgaggtgaggctggcttcaggctgcacagctacaagggcacctgaaatgcagaggcctgagggagcagcaaggacgcccccgactctgcataaaggcagctgagacttgggcccgtggacaagcgggagcccccacagttaggcactgtcgcgctctaaccctgggagctgaagagccacggccagaaggtgcatcacctctggggagacatcctgcccccggtagctggtgtggatggcagatgtgctcacagaggggaggaaaagtccacgacctcagatgcaattggctttcggcaaagggagggacgcagcctccagctgtggtgagggacgtgactggggacaaggcaggggagagctcagggccaggtctggcaaggctcaagtgccagcacctctcaattatccaggaaagaggcacaggatcccaaacaaagcaaaccaacaaataaaaaacaaaatcagtgcacgggaagaaatgtgaaaaacgcactggggaaaacagctccacacgggagtctccactgccgggggctgacgcggtaactagctcccaggttggtgctgtgccccaccaagcaggggcctctcccggtcctcatggccatgaggaaaacaggcagacaccacagccacctttctccatctccacaggcgacacctgagccctgcttggacagaggtggtctccaagaaaacagcagaccatctctggagaaaaagaacaccacatacagcctagcatgtgaagggtgggaaaacacgagggaaaaacattaaccggatgtgagggctcatgtctgtaatcccagcactctgggaggctgaggtgggaggatcggttgaggccagagtttgagactcgcacactccatctctacaaaaaatttcaaatgtagtacaggcacgtctgtagtcccagctacggtgggattgaggctaaggtgggactgagcccaggaggtcgaggttgcaatgagccatgattgcaccactgcactccagcctgggaaacagagcaagaccctgtctcagaataaaacaagaaaacaaggccaggcgtggtggctcacgcctgtcatcccagcactttgggaggctgaggcgggcgggtcacctgaggtcaggagttcgagaccagcctggcaaacatggcgaaaccccagctctactaaaaatacaaaaattagccgggcgtggtcatgggcgcctgtaatctccgctactcgggaggc[131 bp omitted]acaacaaagcaggtctacacacagccgatgttaagagtcagcacacgaagacttcaatctaacgaggattaatacgttaaggaaatggacaaaacgccggagagtctcagcagagacttgaaatttatagaaaagaatctcaaggaccttccaggactggataatacaatacccgaatggacccactgaacagcttttttaccagcagcctgaacacagcacaaaacacaattagtggaatcaaaaggaaaccaatgtttacaagaccaaaaccaaagtgtaaaaggaaagaacaccgtttagggtagtacaagacagtgaggcaacctctaagatacgtgtaaatgagtgacagagaaagcaaagaaggaggcagcacaaaatctgaagaggtaacagccaagaattcttcaaaactgacgactgataccaacccacagagccaggaaactcaggacgaatacaaggacacacgaagacgtgtgcacaggcacaggagagccaaactggtgaaaaacaaacaaataaaggaaaggaaacaactcttaggagagaaaagggcacaatgacttcagaagaaagagtaagaccgtcctctgacttctcaacagaaacgatgacagccaaaacgcaatggagtgaaatttttcaagtgttgaaagaaaacaccctgcaaacctggaaaaacatgccatgaaaatatgctttaaagaatgaaagcaaaaatccaggcttttcagacaaaaaaatgctgaaagaaagcacaaggcctattacaaaggaagttcttccggctgaaggaaatgattccaaatggaagctggaggaaatatgtggataggataaatacaaagaatgttcactgtttaaaacaacaatgttatcatcttgtgatatgtagattttttttttttggagatggagtcttgctctgtcccccaggctggagtgcagtggtgcgatcttggctcactgcaacctccatctccggggttcaagcgattctcctgcctcagcctcccgagtagctgggactacaggtgcccaccacgcctggctaatttttgtatttttagtagacacagggtttcaccatgttggccaggctggtctcaaattcctgacctcaggcaatctgcctgcctcggcctcccaaagtgctcggattataggcatgagccaccacagccggctcatatgtaaaattaacgatagcacaaaaggcagggggcaggtaaattgagttaaactgtttcttgcattgtaggggaactagaatgtacttatttcaagctgtgaggcccggtgtggtggctcactcctgtaatgtcagcactttgggaggctgaggtcactggaggtcaggagttcaagaccagcatagccaacacagtgacacctcatccctactaaaaatacaaaaattagctggggatggtggcgtgtgcctgtagtcccacctacttgggaggctgaggcaggagaatcgcttgagcccaggaggcggaggttgcaatgagccgagatcacaccactgtactccagcctgggcgacagaacaagactctatctcaaaaaaaatgtagactgtgataagtcaataattcatgttgtaacctctaaagcgctaaaactaaaacttataagctgaaacagaaggacaaaataaacctattaa[181 bp omitted]cggtggcgggcacctgtaatcccagcactttgggaggctgaggcgggcggatcacgaggtcaggagatcgagaccacccgggctaacacggtgaaacctcgtctctactaaaaatacaaaacattagccgggagtcatggcgggtgcctgtagtcccagctactcaggaggctgaagcaggagaatggcgtgaacccgggaggcggagcttgcagtgagctgagatcgcgccactgcactccaacctgggtgacaaagcgagactctgtctcagaaaaaataaataaataaataaataaataaataaataaaataaaaatacaaaattagccaggcatggtggcggatgcgtgtaatcccagctacttgggaggctaaggtaggagaatcacttgaacccgggaggtggaggttgccgtgaagtaagatcgcatcactgcactccagcctgggcaatgagagtgagactctgtctcaaaaaaaaaaaaaaaaacaaacaaacaaaaaacaaagaacagatggaacacacagaaagcaaagagcaagatggtggcattacacaattgttttataattacatgacatacaagtgatttaaaaaatgtacatggactaaaaagtctattaaaagacaatggttttctcagacaattaaaaataagatctaggtcggacacagtggctcacacctataatcccagcacattgggaggccgaagtgggcaggtcacttgaggtctagagattgagaccagcctggccaacatggtgaaaccccatctctactaaaaatacaaaacttagctgggcatggtggcggacgcctgtaattgcagctacttgggaggcagagggggaagaattgcttgaacccgggaggcggaggctgcagtgagtggatattatgccaatgcactccagagactccgtctcaaaaaacaagatctaaacatgtgccatttacagaaaatacacttcaaatataggaatctagaatggaaaaaagaatgggaaaaaaccatgcaaacactaaacaaatcaacaaaaagctgctgtggtcacactgatggcagattaagtacttatttacggtaagaagtgttactacagagagacacgtcacaatggtaaaagaaacaattcaacacaaagacaaagcaatcttaacgtgtatgcacttaacacaatgtgaagtaaaaatggacagcattaaaaaggggaaatagacaatccacaatcagaggaggtcattaacaatctttcagtaaatagaacaagcagccaaaaaaattaagtgagaatacagatgatgtgaacaacaattatccagcggatccaagggaatacacggaaaattccacccaacaacagcacagcacactctcttcaaacacgtacaacatttaccaaaacagatcaaataatggacataaagcgaggtgcaactaattacaaagaactgaaatcacggagtatgttttctgaccacagtgtaattcaattaaaaatcagtaaaaggaggctgggcgcggtggctcacacctgtaatcccaacactttgggaggccgaggcgggcagatcatgaggtcaggagatccagaccatcctggctaacacagtgaaaccccgtctctactaaaaaatacaaaaaactagccgggcgtggtggtgggcgcctatagtcccagctacttgggaggctgagacaggagaatggcgtgaacccaggaggcggagcttgcagtgaacagagttcacgccactgcactccagcctgggccacaggtgagactctgtctcaaaaaaaaaaaaaaaatcagtaaaaaggctgggtgctggttcatgcctgtaatcccagctctttgggaggccaaggtgggtggatcacctgaggtcaggagtttgagaccagcctggccaacatggtgaaaccccatctctactaacaatacaaaaattagctaggcgtggtggcgggcgcctgtagtcccagctactcaggaggctgcggcaggagaatcgtttgaaccttggaggcgaagtttccagtgagtcaatattgcaccactgaactccagcctgggcaatagagcgagaccctgtcacacacacacacaaaaagtaaaaaacagaaatccagcaacagggagacatgaacaaggctaaagttagtcctttgtaaagagtaatacaattgataaaactttttgtttttgtttttgagacggagtctcgctctgtcacccaggctggagtgcaatggcgaaatcttggctcactgcaaccgctgcctcccgggttcaagtgattctcctgcctcagcctctccagtagctgggactacagttgcgtgccaccacgctcagctaatttttgtatttttagtagcgacagggtttcaccatgttggtcaggctgttctcaaactcctggcctcgtgatccgcccaccccagcctcccaaagtgctgggattaaaggcatgagcccccactcctggcctctcacatcttaaagaataattcctccagaggttaggaaaaaggcacacttccaaacacattcacgaaagcagcataactctggtaccaaaaccagacacggacaaataaaaataaaaggacaggccagtacctccatgaacatacatgcaaaaatcataaatgtgagcacatcaaactgaggagggaagggattaaatacgtatatgttgattttcattaatccaggtgctcacagcgagcatgtaatcactgcaccaggggatacacagcattttcatcaagcaatcaatacataaacttgtttcaggtgtccacttaaagacgccttactgcaggccgggtgcagtggctcatgagtgtaatcccggcactctggggggctgaggcggacagatcacttgaggccaggagtttgagaccagcctgggcaacaagatgaagcctggtctctacaaaataaacaaaaaaaaaattagccggcgtgcagtggcgcacatctgtagtcccagctactcgggagactgcagcacgagaatcacttgagcccgggagcagaggttgcagtgagccaagattgcgccacggcactccagcctgagcgacagagcaagactttgtccaaaaaactaaatagatagatagataaataaataaaatttaaatttaaaaaatagatacgtaaataaaatttaaattaaaaataaataaataaaatttaaattttaaaaaatgtgtcattgcaggggttcccaacccccaggccacagctggccgcacagcaggaggtgagcggcaggagagccagcatcactgcctgactccgcctcctgtcagatcagtggtggcattagattctcataggagcgcaaatcccactgtgaactgcacacaccagggaggcaggcagcacactccttatgagaatctaatgcctgatgatctgaggtggaacggtttcctcctgaaaccacgccccctactccaacatccgtggaaaaattgtcttccacgaaaccagtccctggtgccaaaaaaggttgggagccactgtctcactggatctgccttgtggattcactaacactgaactcacggccagcagccccagagcttgcgcctgagtggagcttctcgaattttctctgaaagggacatcatagccttcttccacctaagaacaccagacagaacgtcggcactacatttaggggccactttaatccgtcaagtagccgacacaaggcacaaggatgtgaaaaacggcattcagtacacggcaggaaaggcacgtgctcacagtaaaagatctgagagccaagacagagcagcagcttgtcccacctcagctggaactgtacgtcaggtaactcgccttcactgacactctacacacatctgctggcgcctgaccgtaaaggtgttgcgagttttgatttgcggtttcaaataaattttaccaagtaggcaattcaccagcacagaacccacaaataatgaggactgagtgcatgagatacatacacacaagagagaacacttcatggccaggaagcacgtttattccaccgtgcaccgttaacttaacgtttgaaaatcaatttatgggccgggcgcaggggctcacacctgtaatcccggcactttgggaggccaaggcaggcggatcacctgaggttgggagttcgagatcagcttggccaacatggtgaaaccccatctccgctaaaaatacaaaaatgagccaggcgtggtggcgggtgcctgtactcccagttacttgggaggctgagtgggagaactgcttgaatccaggaggcggaggttgtggtgagctgagattatgccactgcactccagcctgggcaacagagcaagactccatctcaaaaaaaaaagattaaaacttgtcagttgctgaaaaaaataagttttaatcttaaaacttacatagatatgcaatgaaaacttacaaagttagaagacttgcaccacctcagacttccttgtaacctgtaataactgagacagtggcgatgactccgggtgagacaagacacaccttacaggcacctgatttaccacaaaggcgtcactgcagctcagtgggggagacaatggacttttgttgtttttatttttatttttatttttattttttatttttgagacagagtctcgctctgtcacccaggctggagtgcagtggcgcgatctcggctcactgcaagctccgcctcccgggttcacgccattctcctgcctc[212 bp omitted]atcacagccttaaatgtgaaaggaaaaacaataaatcttctagaaagaaacgtggaagaatatctccaagagcctgaggtaagcaaacactccttaagtagaacacacacacacattattattcaaataatgattgataagttggactttattaaaattaaagacatcactaagagagtcaatgggcaaaccacaaactggagaaaacagcagcagtgcacaaagcccagaaagacttgtttccacaaaatgtgaatgactacaaatcagaaagggaaagacaacaaaatgggagaaagcttggagcacgcaaagagagaatatccaaatggccagtacacctgcgaaaggtgctcaccagggaaatgccaattaaaaccacaatgggacaggagtccatatccaccagacgggctaaaattcaggcaaattcaccctcagtggcaaacaccgagaatgtggagcaactcccacaaatcattagtgagaaactcaagcagtatgcgtcaccctaagcacacacctcccacacgactccccgctgtccatcaagtgccgagtgcctatgtccactaacgacgcacacgagggcattcacagcccacagctgaaccaaccatgaccgcagcccatggcagaaagggtgggtaaatgtggcatccaaaccaaggaccacgatgcaacacacaagacacacacaaccacggcatccaaaccaaggaccacaatggaacacacaagagactcaaaaaccatggcatccaaaccaaggaccacaacgcaatacacaagacacacacaaccacacagacaactcaaatgacagacgtcatcacaatgcaatacacacgacacacacaaccacgcagacgactcgaatgacacaggcgtcatcacaatgcaatacacaggacacaaccacacagatgactcaaatgacacagacgtcatcacaatgcaatatacaagacacacacaaccacgcagacaactcgaatgatacagtcgtcatcataatgcaatacacaagacacacacaaccacggcatccaaaccaaggaccacaacgcaatacacaagacacatacaaccacgcagacgactcgaatgacacagacatcatcacaatgcagtaaagacacacacaaccacacagatgactcaaagaacagacatcatcacaatgcaatacacaggacacacacacacaaccatgcagacgactcgaatgacacaggcatcatcacaatgcaatacacaggatacaaccacacagacgactcaaatgacacagacgtcatcacaatgcaatacacacacaaccatgcagatgactcaaatgacagacatcatcaccatgcaatacacaagacacacacaaccatggcatccaaaccaaggaccacaatggaacacacaagactcaaaaaccacagcatccaaaccaaggaccacaatgcaatacacaagacacacgcaaccacacagacaactcaaacgacacagacgtcatcacaatgcaatacacaggacacacacaaccacagacaactcgaatgacacagacgtcatcacaatgcaatacacaagacacacaaaaccacacagacaactcgaatgacacaggcgtcatcacaatgcaatacacaagacacacacaaccacacagacgactcgaaggacataggcgtcatcacaatgcaataaagacacacacaaccacacagacgactcgaatgacacagacgtcatcaccatgcaacacacaggacacacacaaccacgcagacgactcgaaggacacaggcgtcatcacaatgcaatacacaagacacacacaaccacgcagacgactcaaaggacataggcgtcatcacaatgcaataaagacacaaccacacagacgactcgaatgacacaggcgtcatcacaatgcaatacacaggacacacacaaccacgcagacgactcgaatgacacagacgtcatcacaatgcaatacacaagacacacacaaccacgcagacaactcgaatgacacaggtgtcatcacaatgcaatacacaagacacacacaaccacgcagacaactcgaatgacacagacgtcatcacaatgcaatacacaggacacacacaaccacacagacgactcgaatgacacaggcgtcatcacaatgcaataaagacacacacaaccacgcagacgactcgaatgacacagacgtcatcacaatgcaatacacaagacacacacaaccacgcagatgactcgaaggacacagacgtcatcacaatgcaataaagacacacacaaccacacagacgactcgaatgacacagacgtcatcacaatgcaatacacaagacacacacaaccacgcagacgactcgaatgacacagacgtcatcacaatgcaatacacaggacacacacaaccacgcagacgactcgaatgacacaggtgtcataccgagtgggaggggccagctggcatcccatgggacgaagaagtcctggctgctccagacagggcaccctcatggggggtgagtcagggtggggaaagggccctgatgacagactccaaagccagggtttctgggtgagggtcccaagtgtcccctccgaccctgccttctggatgtcccagcagcttggctgcaccttcctggctccgtcctcttctcacacggggcacccccgaccagccccaggaggacgacttctcttcacggagggtccctgtctccctggactcagtacttctgctgcacctgtcccttcccaccacgcatctcagccactgaatcaccttggagaaggctcctgagctaggagcactggcccagggcctgcaagggctccagggcaacacaaatgagacccaagtcaatgggcacgtgactccacgcctcaaaggggcaagagagggtcgattttgaactctagtgggaaagagacgaaggtcaagcccaggaaagggagcaccctgaagaggagcggagcaaggccgggggtgcagcgcagcatccggcgggtctctggagaaccatctaacccggcacagagccatcgaatgcagcggcccaggctgtggggaggcggctggagtcaagggcagggcagggctgggtcagaggcaggacgggctgctgagggtctggctgcacaggctgaccagagcagaccccaagggagggacagagctgggcaggggcaggcagcaataggcccactgcagccacgagagcctcccacctcctccagccacaggctcagctgccccagtgagcgatgcggggcggggacctgaccagactgtccaaggatctgacgtccagccaggccactccccttgcagaagtgggtttcgcctcctctccccaggccctacttactcttctcacagtgccggttcaagtgcaggttgctgaggtcagcttggaactgaggtcccaccatgatctcctgcaaagcaagcacctgggaatcaggacactgaggagcatctaggccgggcgggaggctggctgcagcgtgctgtggcaggcttacggggaggggccactgtccagaccccagacccatctgtgccgtctacctgctgatgcccagttctggggtctgaaggtgggaggcagaggcctgggtgtgtgaggggtgaggctgtgtcctgacgcctggcctggcagaggcccagacaggatgtcggaggacaaacactctgggtcagcagcaggggcccaggctccggtccaaagcacctgtggccggtcccagcccaccctggggtcgagcagcacgtccctcctctgagaaggggcacaaacccagggagagggctcagcaggacccggctgcggttactgaggccgagataccaggttggggagagggcagagccatgggagggatgccaggttggggacacggcagaaccacggctgggatgccaggttggagacacagcagagccacggtcgggatgccaggttggggacacagcagagccacggttgggatgccagtttggggagacggcagaaccacagtccggatgccaggttggggacacggcagagccacggccgggatgccaggttggggacacggcagagccacggccgggatgccaggttggggacacggcagagccacggccgggatgccaggctggggagacggcagagccacggtcgggatgccaggttggggagacggcagaaccacggccgggatgccaggttggggagatggcagaaccacgtaccttcttacatttgttggcaggaagagagtcctcctcggtgtcggaggaggcagaagagccaggctctctgtcttcatcagccaggaaacgagctttgggaaaacagaggcaggtcccccagggtctccactgcctgcagcctatacaaccccttctctccactcccattctccatccacctgatccccaggccataaccctctctctggccagacattgggtaaacagatgggcacaggacccaggaccagggatgcacctttgaagaaagaggccttcccttctatgcagctgctgcacctctgggccccgagccctcagttcccaggaaagccagcacagaggcttgtgaaggaggccggttctgggaatgctgtccctggatctgctaggggaaccaacatgttccctacttgtttaaaccaaatcgctctgagagtccaggctcactggccagcgtggaggagaacaaagcacccccagggctactgacgcttcccgccaggcagacgccctcatctgtgatgagttcttggcctgcatcagcccaaggacccttcatcaagcatcacgactgcctggcagggggcctggctgcggtggagtatggggacagagtcacctacatccactccggttagggaagaggtcggaggcctcgtgggaggtcacggacggggtgaggtcgtcagcagatgattgcgtctcttcctcttcttcccctgaaagcaaatccttcgctatttgttcctttaaaaaaaaaaaaaaaagtaaagaacattttacagtttaacaatctcgcaataccactaatgataacaacagtaaagacactgggagtgccctgaggctcacatggggctgctattcccattctgcaaagggtgcacagcgtggggggagcggggatgggaaggagacacgtgggagcccacacccagccaccagagctggagacagttagagctgccactgggcacacgcccggagtgcatggctctttctctgactgtgcatttggttttaaccttctacaatgcagcccgcccctgctcccaacacccaagccttgacctgtgacctctgggtacggaatggcagagagaccagtcctggggaggccccgatgtgcccctccacccaccaaagccagaatgacatgtggcctggggttaaggctagggtccagccccatgcccatggccattccaaccccagggtagtggtcacaggtacattctacttattctgggggcctttgtgcctcctctcactgaacactcccctctgcagagaggcagcgccaggcccccccaccttcagctgtgagccagttccaggaagggccctcacttactttgtccagggtcatgtctgggaggttcggggccacgtcaccaccctcactctcccggtctgaaatggggtctgacgcctcgtagccatagagcgcaagcagctcatcaaagggcatgtcgttgctctgagttggggaagggaacaaggccccatcaggagggacggctctgggggttcctgtccctgtcctcttgcctgagcctcactggccacaaccagggccactctgtcacacccatagcaactccccacatggcagcactccccagccagacctcaggcccagtccttcatccaagagctcctttacaatccctcagaggcaccagagcctaggggtcaccggccagggaagagggcaccaccctgcccacaatgcctccttgcacagggtgaattacaggaatacaaggatggtgtgacacagggtgaattacaggaatacaaggatggtgcgacacctggcaatttactattgtaactcaacatcaatatattaaaggggaaaaaagttatctgaaaaaggcatttggtaaaatccgacatctattcctgatttgaaaaaaaaaaaaaaggaactctcagaaaactacataaacaggccagacacagtagttcacacctgtaatcccagcattttggaaggctacagcaggcagatcacttgaggccaggagttcgagaccagcctgggcaacatggcgaaatcccgtctccactaaaaatacaaaaattagctgtgcttggtggcatccacctgtagtctcagctactcaagaggctgaagcacgagaatcacttgtactcgggagatggaggttgcagtgagccaagatcacaccactgcactccagcctgggtggcagagtgagaatctgtctcaaaataaaaaaaaagaagaaaactatgtaaacggatgcttcatcaatataatggagaagctgtcaattcacactcagtcaaaaatgggtaaccagagcagcccccatcacgatctggaacaagagcactgtgattaacgaacactgttttgatgctctgagccaatgtaatatgacaagaagtataaataaggcacgtaattcctgggaaggaagagatgcgaactatcaacatcatgctctccagtgctgctttcaaatccttctgtcctcccttgtgtgagcctctattccacagaggctagtcctgtctgctcagactccacgctgatccctgtgggtcactttcagcttccaacttccggaacactccctctcattctctcaagatgttagcactggcctcccctccaccccagctcctgcccagactcaacctgggggcttcaagtccacatagaaacctcccagcctagtcccagcccttctccaggtggaatatctacactgagtcccccttttgttctctcacaggaccccgtggaaagaacagattctgtatgtccattaccttcaggattatgaaggtgggaaggttgacacagtggtccagaggcccttgggttgcctgaacctctccatagtagcccaaggtgaagaccctttcctaagagcactcagccgtgacttccatttttggcttcattgaggcttgcactgatagtgcagcattggcagccggcaagagcccagtgcccgtggaagctgcagccagtgcatccctgcccacaagtcactgctgtcacattcctcacagaccaaaagcaaacaccccagcttcacttcagaagatgctggacagccgggcaggatggctcatgcctgtaatcccagcactttgggaggctgaggcaggcggatcacgagatcaggagtttgagaccagcctaactaacatggagaaaccctgtctctactaaaatacaaaaattagctggggatggtggtgggttcctgtaatcccagggagaatcgcttgaacctaggaggcagaggttgcagtgagccgacattgtgctactgcactccagcctaggtgacgagagcaatactccgtctcaaaaaaaaaaaaaaaaaaaaagaagatgctggacaaagtgagcattttgttaagtctcaccctgagcagatgtttccatgtgctgtgagggcgtgggaagcatgcagaatgcacctgctgcataccaaagtgaggtggttccttcaaggaaccacatgcatggaacgagtggtgagacgaagaggctgttcctggtcgtttcacctgaaagaatgctggccaactatagccactcagaaaggcacctggcaggcgctgccttgtatgcaagccaggggggctgttactgcaaaggaaacagctgaccataactgctgcaatggtaaaactcaagattttgaaaaacttgggtttgac[133 bp omitted]gaacatgatgaaaccccgtctctactaaaaaaaatacaaaaaattagccaggcaaggtggcaggtgcctgtagtcccagttactcgggaggc[134 bp omitted]aggctggtggtgatatcaactgttacagtcaaccctaagccccaacatgactatatttggagacggggcatttacagaggtaattaaggttcaaggaggccgtgagggtggggccctgatccaacaggattagtgtcctttcaagaaaaacaccagaaggctccctcttgttctctatccaccatgtgaggacacagcaagccaagaagagagccggcaccagaacccactctgctggaccttgatcatggacctttctgcctcttgacctgtgaggttcactgatacggtctcagattccactccacaactactctctacaaaactatcacttgatgggttttgctgtagcatcaaagaagaatacccacaattatccgaaaagctgtgaaatactcctacctttttcaaccacagatctggctgaggctgtattttaacttcagccataagagcctatcacaacagatcaatgtctcccttaaaagacagaaactgaccaggcgtggctcatgcctgtaatccaagcattttgggaggctgagatggcaggatcaacttgaggtcaggagttcgagaccagcctggccaacatggtaaaacctcgtctctactaaaaatacaagttagccaggcatggtggtgggcacctgtagtcccagctactcaggaggctaaggcacgagaatcacttgaacccaagaggtagaggttccagtgagcccagattgcaccactgaactccagtctgggcaacagagtgagactctgtccccagaaaaaaaaaaaaaagacagaaactgggtcaggtacagtggctcacacctatactcccaacactttgggagacctaggtagaaaaattgcttgaggccaacagtttgagaccaaccctagcaacatagcaagaactccacaaagaaataaaataaaaacgttggtgaggtgtggtggcgtgcgactatagtcccagttattcaggaggctgaggcaggagcatcccttgagcccaggagttcgaggctgcagtaaactatgattgcaccactgcactccagcctaggcaaaagtgagatccagtctcaaaaaaataaataaatgttttaaagacagaagcttggccaggcgtggtggctcatgcctgtaatccagcactttgggaggccgaggtgggcagatcacaaggtcaagagtttgagaccagcctgtccaacatgatgaaaccccgtctctgctaaaaatacaaaaatttgccgggcgtggtggcatgcacctgtggtcccagctactcgggaggctgaggtaggagaatcacttgagcccaggaggcggaggatgcagtgagccaagatcacaccactgcactccagcctgggaaacagagcaagactccatctcaaaaaaataaaaagacagaagctggattttcatatttgcttctacattcaaagagatatggaaaactaaaaattcagtcttctaattttttttcttttgggacagttctttttattttcataaaaatatttatattaacatgtcactgatttattcagcctcctgagtagctaggactacagacgtgcaccaccacgcctggcaattttcgtattctttttttttcttgagatggagtttcactgtgtcactcaggctggactgcagtggcacatctcagctcattttaaaatgagttagcgaataagtatttttacatgtcaattttttttgtttttttgagacacagtcttgctctgtcccccaggctagagtgcaatggcctgatctcggctcactgcaacctccgcctcctgggttcaagcgattctcctgcct[134 bp omitted]cagcctcccaaagtgctgggattacaagcatgagccaccgcgcccaacaatttttgtatttttagtacagacagggttt[132 bp omitted]aataaaaaagcaatagataaagcacattaacaaagctccttgaaactctaattttttttaatttttttttttgagacagggtctcactctgtcgcccaggctggagtgcaatggcgtgatctcggctcaccgcaacctccgcctcccaggttcaagggattctcctgcctcagcctcccgagtagctgggactatagacgtgcaccaccacgcctggctaattttgtattcttttttttcttttttggagacggagtctcgctgtgtcacccaggctggagtgcagtggcacgatctcagctcactgcaagctccgtctcccgggttcacgtcattctcccgcctcagcct[134 bp omitted]cagcctcccaaagtgctgggattacaagcatgagccaccgcgcccaacaatttttgtatttttagtacagacagggttt[132 bp omitted]aataaaaaagcaatagataaagcacattaacaaagctccttgaaactctaattttttttaatttttttttttgagacagggtctcactctgtcgcccaggctggagtgcaatggcgtgatctcggctcaccgcaacctccgcctcccaggttcaagggattctcctgcctcagcctcccgagtagctgggactatagacgtgcaccaccacgcctggctaattttgtattcttttttttcttttttggagacggagtctcgctgtgtcacccaggctggagtgcagtggcacgatctcagctcactgcaagctccgtctcccgggttcacgtcattctcccgcctcagcctcccgagtagctgggactacagtcacccgccactatgcccggctaattttgtttttgtatttttagtagagacagggttt[131 bp omitted]caccatgttggccaagctggtctcgaactcctgatctcaagtgatccacccgcctcagcctcccaaagtgctgggattacaagcgtgagccactgcacccagcctgaaactctcaataatttttaagagtacaaagcaggttctgagaccagaagatttgagagcagctggcttaatccttgaccaccgtgctgctcagagagccccatgaaagacctggtctccactgaatttcagctactaggacagcatctggcactttgcaaaaagatgtacaatttagcacttaccaatgtggaatctgagctgcacaaaactcatgaggcttaccccggagggctccacccaacacaggggcaggatcaccttggccaagtacctgggagatgaagtccttctccagctcctccttgggcttgtctgggcacctcgaggcctcctcgcactcccccctaacactgtagttctgtgacaggatctctgcgaggttgaactgatggtctccagagcccatggacaccactggggagaagagagcagcccaggtgagcaccgtgcctcgcctgtcccaaccatcctgccgagactactgacgcctggtgaagccctaaggatgaggccctctgcatgctgccaggatcagcctcatgagggaacccaacaggacaccccacgactaatgcacacaggagcacggctggtgagctgcacatacaaattccaaggatttttttggggggtgggtgtgtctctttctgagagactgcttgtcttcctgaacacagagaagcctgcgaggatttggggagcaagtggactagaaagagaccaacacccatctcgttagggtagaaggagcagcaggactcagtcgaggtgggttcacaccggactccatgactcctgaaacgggggtgacgctgaaccctcacctgcacaggtcagtacagcatcaaggagcatgcagggacaaaccaatgggggctcgacaacaccagtcccttaagctccgtctgcagggccacatgaagaagacatgcgatgtacatggcccaacagttgacggctgtcatcagatccagggtttccccgaaagaactgggatgtgtcaccattcctctgcatgtttactctccaattggtcaaatttttaaacaaacaaaggaaatagctagggctcaatcaatccagacagagagcagtgtaggccaaggctgggggcctgagggcctgggagtccagggcacgaggcctctagggcagccacacagcctgtagggctgggcacacaggtgtgcaccacacacagcccatgcacagaacatgcagctgcagggcacagaggacccccagcggcaggcacctcgttagagtgagggaatgacctggagctgaatgggtgcgcccggaccctcagtggccaccgcacccttggaggagccacgtgagggaaaacagggatggcaccgccttctctggggactcgggtggtgactagtttgatacggaaagagacgcagccctacacctggcagaaggagcccagccaggggaagaacagtcatagagacccttgccctacagcgtcagctcctccccgcaggcccaacgcaggtggctggcaggcgggcatgggaccttgatgcccactgggcaagcagcagcgcagggaggtgcagggaacccggggtgctgcctgtctcgccgccctccaccttctcagccccggctccctcagcaagccaccccttcccaacaccctggcaagatgaggcagccctcagctcggtgcaggcgtgtgcccgggtcctctgctgggggtgctgggctctgaggatggtcttgggtcgcctgggctccctgcccctgctaaagaacaggaagacgggagtcctgaccactctgccccacagctccatctgaacgggtgggagctgggacaccctggactctggaagccagtgtgccggtccacagctcagccaggcccagcaggcattctgtctctcacagccacaaaggccttggcggacctgagcaggggaaggagggaggaaggtacctgctgttgtctgcaagcccggctcccctgggcacaggctgtgctcgaggcaggagaccacgcgaggactctgcctccccagcgaggaggcctgcgaaggaagagaggcagggttagctcggccggcccaaaacctgctgctggacatcacagtgtggcagccaagagcaagcgctggtcagagcccagtccccagtgaccagggaaggggctttgtctccgcctctgagggctggggggcactaggagcagcacacgcatgtggccgccactcgccccgcctcccaccaaggaccgctcacagggtggaggcgttctcgcccagggcaggacatgcatcatgtgacactgaaaactgcccacacacaggcctacagtcctgacccatgctgcaacctggatgaagctcaacaacagcatgcactgggagggaagccagacaccaacggccacagcgtagggtccactgataccaaacatccagaacaggccagtccacagacagaatgggggctcgtgggggccaggagccagggagagagacagtgggagagtgactgctaacggggacagggcttcttttggggatgacagaatgttttagaatcagatagaggtgatggttgcatggtcgtgaatacactaaaaatcaatgaattataaactttaaaatgggcatattttatggtttgtcaattacaatttttttttataaaaaggcaaacaaaaccattataagtt[132 bp omitted]ccttagcctcccgagtagctaggactacaggtgcgcaccaccacgcccagctaatttctgtatttttactagagatgagggtttcaccatgttgcccaggctggtctcaaactcttgacctcaagtgatccgcccgcctcggcctcccaaagtgctggcattatgggtgtgagctaccgcaagccacgatatctctcatgtacataaacacaaaaccctcaacaaaatactagcaaactgaatccagcaacacataaagatgattataagccacgaccaagtaagatttaccgcagggatgcaaggtcgatttaatatccaaaagtcaattaatataatacatcacatcaataaaataaaaaaacaaaacacaggatcatctcaacatacccaatccaacaaaatccaacatactttcataaggaaaaatacccaacaaactcagaacagaagggagcttccttcttggaaaaacccatacttatcattgccctcaatggggaaaggctgctttctccttcacaccatgagcaccacaacgtgtactctcacctctcatgctaaatggagggctggatggtgtagtca[138 bp omitted]catggtgaaaccctgtctctaccaaaaatacaaaaaaattagccaggcattgtggcatgtgcctgtaatcccagctactcaggaggctgaggcaggagaattgcttgaaccagggaggcggaggctgcagtgagccgagatcgtgccactgcactccagcctgggcaacag[141 bp omitted]aaaccctgtctctactaaaaatgtaaaaattagctgggtgtggtggcgggcacctgtagtcccagttactcgggaggctgaggcaggaggatcgcttgaacccaggaggcagaggttgcagtgagccgagatcgtgccactgcactccagcctggcaatacagcaagactccatctcaaaaaaaaaaaaaaaaaaaaaaaaaaaagattggtaaggaagaagtaaaactatctctgtgctggtgctggtgacatgatctaaaaaactattcaaactacagtgagttcagcaaggttgcagtacacaaaatcaatacataaaaatcaattttatttctatataaaagcaacaaatacaaaaagaacaattccatttacaatagcatcaagggaagtgtgaaatgtgtacagtactctgagtgaacaaagcagtgttgaaaggaagatccaagggaatgtaaaggcatcccacgttcatggctgagaagacaacattaagacggcaacaccccccactgattgacaaattcaacaccatgtctatcagaaccccagttggcttctttgtagaaacccacgagccgatttcaaaagcatatggaagctcaaggtaccccaaacagcccaaacaatcttgaaacaatacttcctgatttcaaaattcaccacagagccacagcaatcaaaacagtgtggtactgccataaggacagcacaaagatcaacgaactagaactgagaatccagaaatacagtcacacattcatagtcaactggatttccacaaaggtatcaaaacagttccatgaaggaatgaacagtctttaacaaatggtactgggacagttgaatatccatgtgcaaaagaatgaagttggacccctatctcataccatatgcaaaaattacctcaaaatggatcaaaggccttaaatataagagccaaaaccacacaacttttcggagaaaatatatggataaatatttgtaaccttttgattgaatctaaaaatgtggtgggaaaaaagtttgtgaccttggatttggcaatggtttcttagataagacaccaaaatcacaagtgaccaaaaaaaaaaaaaaaaaccaaatggataaacaacttcaccaaaattaaaaacttttgtgcttcaaaggacgcccccaagaaagtgaaaggacaactgagagaataggagaaaatatctgaaaaataatctatctgataaggaacttcttctcagtataaagaacgtttaaaactcaataaggaagagagaatcccattgaaaaataggcaaaggatctgaacagacatttctccaaagaggacagacaaatggccaataagcacaggaaaagatactcaatgtaatatcaggcaaaagcaagcaaagtccacactacgataccacttcctaatcagagaataaaaactgtgctcaaaaagacagtaacaagtgttgacaagaacgtggacaaagtggaactctcctgtgccctgccggtgggaatgtcaaaatagtgcagccactttggaaaatagtccagcaattcctccaaaagttaaatagtatttaaccatgtgacccaggtcagggtcctaatatccatcagctgacaaaaacaaaacaaagcactagcaacggggcaaagaaggacgcactgacacactaccacatggacgcacctcgaaagactcatgctcctgaaacagccagacacaaaaggccacgtgtcgtatgactcatttaatctcaaatgtctagagcaggcaaattcgtagagacagaaaatggattcctggtggaaaggggctgggagttgatctggggtttggggagtgaccactaaggggtgtggggttccttttggggtgatgaaaatgttttaaaattgactgtgatggtggctgcacaactgggtgaatacactaacaaccactgaactggacacattaaaacggtgaactgcatggtaaatgaattatacctcgggaaagctgctgccaaaaagggtagattaaaatatttaatgaagtttaaaaacttgtgtagtaagaatttcaatacttcttcacgggtcctcaagaaaaaacctcacaggtggtataatcattcccctcacaaaaaaacaaggaaacaagctcaaagagatagagtcagttacccaagctcacacagcaggttcagtggtgcagttacaaagtggagctcaggccagcggcttgcaaacaccttccagcccatcacactactggggaacacaacggctagtacagttgacccttgaacaacgcaggggttacgggtgccaaccctccacacaggtgaaaacccatgcatgacttctgactccccgacacttgattaatagcctcctgctggtcgggagcactgccgataacatcaacagttgataaacacatattttatatattgtattatgtactgtattctcacaaaaaaagtaaactacagaaaaagttattaagaaaattgtaagaaagagaaagtgtatttactattcattaagtggaagtggatcatcctaaaggtcttcgtcctcatcatcttcacgttgagtaggctgaggaggaagaggaggggttggtcttcctgtctcggggtggcagagatggaaggaaatccatgtataagtgacccatgcagttcaaacccgtgaggttcaagggccaactgtacagcaacgtacagcaaagccacggaagggagctggggcagccactggccctggagtgactctggcaacaaggctgccaaggaccaaggagcacctcaagctctaagtggagactgacaggacccatccagctttagaaagtttagctccgtggtggcagagggcaaacagaagacagagggaaggaagagccagcagggcccccagggggaaggggccacgggactggaagcaagcagcacagagtgcatggcagctgcaggggcatctcacgcctcctgccctggggttggcctgggtctggcagagatggcctcacctctttccaggacacagcaggtggccaccagcccacaaccactctacacagccacacgcggtgtgaagccacagggaaagcatcctaagtgacctctgaaatcaccctcagccccctctaggaccctctgggtaggggtcgaggacaggttctctgggcaacggttcctgcctcagtcaggggctggctttctactcccgcaaccaggagcctgactaacaaggggatggcaggcgaccacatcaaatgaggccccagtctggacggcaagttgacaacagtcccgcaggcttgagatccacaccgagtaacagggagttaacatatggccccaggagaggtggtctgcagggtctgaggaggatctggcccttatatgacgtgccatttaacaggagagctaaggcagaggggggcaaagagggaagcggctgggaacggcagaaagggccgctaacagggaggccctgagcagcctgggatccccaagttcatttccaggcgactctgagttcctggaacttaccacggaatacagacttcatggatcttcttcctcccgctgcccctgcctggtgtccaggtgcaagtctactctcaaagcaggttcccagggactctacttcactcactcagaacactctgcatgtttccctctgagttcactcccaggaaagacaaagtcctctgttttgtcaaagtggaagcaggaaaaagagggggagcaggccaacggtattccaggcaacaaaaaaagcaaaggaagcgtaaacagcattctagaaacaaggtccagaggacaacaggccacagacccaggcgtccaccagggtcttcaggcagtagaagcggcagccagctactcaacataaagactgcaccagaggactgggtgcagagcacagaccagcccttcccccagggcagcccccacaggtatagagtgcaccaaaaacacaagaggccaccctgcaaagcttaacccaaaatgacagggtggcaggttccattcgccaagatggctgcacctacctctcccatgccccaagccctctccccagtgtgactgaaacaacctcctcctaagagccatgcttgaccctcctcccacccacaccaactcaagtgccaggcgcttgttggactacccagcaccccactcctccgtctgaccaatgttccctgggcgcccactctgggctcagcaaggcagtggcgtggtggttaacctgagaaacaagttccacctgcctccacccacatggagttgctagttttggacacagacaacaaacaagtggacatgtatggtaccgagaagagaaaacagggcgcacgggctctgcaactgcgggtcagggaaggcctggggggcctcagtcgaggtggaaccatcgttggcagcccccaaatgggtagagtgcaccagcaaacaggagcccagggccctagagtagggggcagatccgtggggaccacctcacagggctgtgggactcagcaaggaggagcattttatcccagggaccatgaaaagccatggagggttttaggtaggagcaaaagatggtgctcttaggtttttaaaagatcaatctagtatgcctgagaaaagtatgaagcattcccgtctgccactgtggtgcttatgattattctgggatactgatacagaataaagtagctagtactgatcacgtgctataaagttacaaattgccacttttacgggttaaaaacagtggaatatcgtcaacttcacaagattcaacttccatgtacaagccgttgtggcaggacctcatcagacctcctagctctgaagggtgaccattaaacttcccatttcagagatgaggaaaaggaagttctgagtcactgggcaacctgcccaagaccacacagaacaagtccggtggtcagacagcttgccatggctcctcacgctcagcacctcatacttgttggtcctaacccacccacgtctctctctgaccagactctgcatccctgtaggagaggccctgtctgctccattcactcccagatcctcaggccgaggacagagcgggacctccttagaaaatcaaatcaaattcactcaacagggcaccaccccaaagtgtaaaacagggttaacaggagcagccggaccacaagctgctgtgcacatttacggagctcagcctagagcagggcagaacagccacatggcagctctgggggaggctggcttgggagtctgacttgtgccatcccagacacagagctacctgtcaggccacgtgtgttgcccagattccaggagcacaactcattcgaccaccacgtcgctgcagggccactgggagacgcggcttctgcctccgaccctggaggacagccaccatctgcatggggactcagtctccctaagcgtctcaagaagaactaattctcgatgaaggaactggccggtggtctggcctagtatcgagacacctacaccgtctttggcataaacacagggcctgttactgcccctgaggtcgtcaccagggggagagaatggccagtcctgcctcccacaacgcccaagacataaacacgcaacgtggcaccacggccaggccgcagttccaatcccggcttcccacgaggcggctgtgcctggctgggtgggcaccttttcctttgggctctatcccagagataggatcagctcttgagtctgcccgcctgtcgtaacttctgcgcacagaagtcatgcactgagtcccactgactgagcacctcgcagccgccgcaccttcacctacattatctctttccatcttcaccagggccctccaaggtgaaagcaagtccacacaggctcatccaccactccaaaatcaaaaaaagcttcaaaagcgaaagtttcttccttcctggtttgacctgacacgaagctatctgttgtcttatcctagacagtcctaggtgggtttgatcaaacatcacagtccaaaatcccacagatcctcaaattggaaaaattctggattccaaaatatagctggtcccaaacatttcagataaagggtcccgggcttgtttcctggacgagggaggaggctccagaagtaacttcgtgcccgggagaggctggtccaactcttctgagatcagccccgacgctctctaggccccggcagacccacccaccctgcgcccagttcgcgccaggcgggtccgcgtcgggagttcaaatcccgcccggggtctgacccagccccgccggggggctcgcgggcggcggaggcgcggtgggtccaccgggatcccgatggggagcgcggggcgcctggcggccccagcactcggcaaagttggcaaaggcgcgggaggggaggcctgcgcgccgcggggcccgggccggggccgggaaccggagccggaccctggaacggagccgcgcgcccaccggacccccgacaccagccccgccccgcgtccctcccctcccccaccccggcccccgcccgccccgcgccgccgcgcatgcgcactgcagcccgcgatgtggcagccgggggagttggggggtgggggccggccgggggcggccgccgatggagccccgcgcccctccggccccggacgggccaggcgccccggccggcctcagagctccagagcggggctctccgtccctggggcccacgacgaggccgagccacggcggcggggggcgcggacgcgcgggggcggggggccggctcccccggcccgctcactcacctccgccatggccgtgtgtgcgcgggaggcggtggccgcgccgggatccccggatgaggggccgcgcactcattggctgtggagcctggagggcggggcagggggcggagcctggagggggcggagagcgggccgggcgcgtagtaggtgcgcgggcgcgggcgcgggcgcgcagccgagcgtggccggcggcttctggcgagcttgcggtgtctttccggccgtctctgctggaccctgatcttggccttggccttggcggaggagactgcattccataaaaatacgaattcctgataatcacacctgcgtggggaccacgtggtcctgtgtgacctcttcattccctcggctgctcgctgttaataccccgcgtggcagactaggaaactgaggcccagggcgacgggccacccagagtgtcagtgatagagccagaattggtgtccgggctgcgtggttctggaattttctgcactttcgcacccgtgatgagcaaactagcgcgcggaggaaccaatcggggagcttgcgaacgcgcaccagtcggagaggttttagaaacggtggccccgcgccggagagcccaaggcgggaggcagggaggtgggcttgaccccagggccatttggttctgcagtccgtcgtttcgcagattgaacatttctggaacacgtgcacgttctgatcctgagggtttgaaggagacagccctaacgcctgtcttcagggcgtttagagtggaggatgggaaggcaaggactcgccacaccttaaatttgagacggataagtgccgtgaatcttcggggcgcacgatgcagagagaggataggaagcaggggtggggcgtgaagaggcaggggccaggtgggagctgtggggcctggaccagagtgcagagagacttgagaaggtggacaccacaagactcgctgatggagggaagctggagagagtgaaggatggcctccagatgtctggcttgcgcaaatgagtggagggcggttcctactgagaccaggaagaagagaactggagaccaggaagaagggaattggggaccaggaggaagggaattggggaccaggaagaagagaatgagtctcattcctgtttcccagtgatcagccaatgaatagtgagaacttgacatgcatcagccttgattcctgatgcaaaatcattactcagtcctctgagaattcaccaaccaagagatagaagaaccactctggaggggtctaccctcactccttttttggtttacatcattgagattgagggttctggccctcgtgttgaagagtcctcactgatttgtgcaagagttggttccttcctttattattcatttgttattattcattcagtcattcagtgaactaaacacatatcttatgcagtcctcaactgggtgctgggtagccagaggtcctgtgaagcagggagaagcatgaacagataagagagtgaggtgctgtgctgtaacaggtggaggggcccgaagacaagggcttgagtccacctggcaaaacgagggaagactcttaggagagggcttggcaagaatcatcacatagatgtcaaatgaggacttgggtgaagagaagggtattgtggcttggaacggtgactcacacctctaatcctaacacttggggaggcagaggcaggaggatcacttgaggtcaggagtttgagaccagcctgggcaacagggtgaaaccctgtctctactaaaaatacaaaaattatccgggcgtggtggcgagtgcccataatcccagctattctgtggaggctaaggcaagagaatcacttgaacctgggaaggcagaggttgcagtgagctaagatcactgcactccagcctgggaaacagagtgagacactgtttcaaaaaaaaaaaaaaaaaactttaaacattagagggcatgacgataatgtgcctgtagtcccagctactctggaggccgaagtgggaggatctcttgagcccaggaggtcgaggctgcggtaagcagtgattgtgccactgcaccccagcctgggcaacagagtgagacctgtctcaaaaaaaaaaaaaaaaaagagtgaaggatattttaaggtctgaaagtctgtctccgtagactgttagtcgcagtggagaaatgaagccacttgttgggtgggtgataaaactcagcatccctggtaaagggcaggtgcacaccatgtgcacctggatgtggtgtccaaagcaggacacggcatcactgaatccagccagcaatgcacaacccatatctacatatgaggaaatttcagacaaacccaaataaggaatattctgttaaacaaaagagggactgtattcttcagaaatgttaatgccacaatggggcgtggtggcgggtgcctgtaatcccagctgctcaggaggctgaggcaggagaatcacttgaacccgagaggcggaggttgcagtgagctgagattgcgccactacactccagcctgggcgacaagagcaaaactccatctcaaaacaaaacaggccaggcgctgtggctcacacctgtaatcccagcactttgggaggctgaagcaggaagatcacgaggtcaggagttcaagaccagcctagctagcatggtgaaacctgatctctactaaaataatacaaaaaattagccgggcgtggtggtgcacacctgtagtcccaactactcgggaggctgaggcaagagaatcgcttgaaaccgggaggtggaggctgcagtgagccgagatggcaccattgcattccagcctgggcgacagagcaagactccgtctcaaaaaaaaaaaaaaaaccacagcgacaacaacaaaaaaaagttaatgccagaaaagataaacctgtgtaaatctttttttttttttttttttttttgagatggattctcgctctgttgcccaggctggagtgcagtggcacaatcttggctcactgcaagccccacctcccgggttcacgccattctcctggctcagcctctggagtagctgggactgcaggcatgtgccgcacctggctaatttttgtatttttagtagagatggggtttcaccat[134 bp omitted]ttccatgagcataaaatgaagtaaaactcagaaaataaagagcagcgaatcttgagcagggagcttaaggggagaggctggagagggtgcccctggccgtggcacagtggtttgagtggacacctcacgttggaggagatacgcctgcatgtgcctccactccaggctccctgtttcttctctgcctggttttcatggtcaccgggcagctcccaagtttgacagaggcatggtgtcccgggatgagggtccaggtcaccgcatcgctacacctcttggagcagatggagactgcgtggtggagctgggggtgatgaatccattgcagccccgaggcggggaggcaggggacgctgtagttcacccaagcagtgtcgttcttgcaaattttccctagaaaaaagaggcctcacaagatactggaggagctgtgagtagtgcatggggtggcctgtggtggatgctgggtgcatcatcaaaccctcccctacacaagcactaacttccccctctgctcagggtcaagtatccctctgaggggcggcccacatcagcgactggctggtacagatccataaagacccaggcacctgtgaccaactggggtcaaccgtgaggctgcagagctcctgtaggattggaggcggcttggtcatctcagctcgctcctccctccctccagccctgcttccttcactctctgacaggtgttgaccccaagggtaaccccgacaatattcctgcacataatctttgtctcgcagtctatttcctggagacctaacccgtgccacaa[146 bp omitted]cccatctctactaaaaatacaaagattagccgggcgtggtggcgggcgcctgtaatcccagctactcgggaggc[144 bp omitted]gcaccacggatgaggtagtttatatatacatattttaagaacacatttatttatcacagttctggaggctggaaagccttgatcaaggcgccggcagttttggtgtctggtgagagcctggtctctgctcccaaaatggtgccttggtacagcatcctccaaagggaggaacactgaaccctcacatggcagaggggatgggcagagagtgctccctttgacctcgagccctttttttttttttttttttgagacggagttttgcctttgtcacccaggctgtgcaatggcgtcatctcggctcactgcaacctccacctcccaggttcaagcaattctcctgcctaagcctcccaagtagctgggtttacagatatgcaccacgacaccaagctagtttttatatttttagtagagatggggtttcaccacgttacccagg[134 bp omitted]gcagagccctgatgtcttaatcacctgccaaaggtcccgccttttaatacaattgcactggggattaagtttcaacatgaattttggaaggacaccgtcattcaaaccatagcaagaagcaatacaaattgaaagtataacataatgagagagaagaggccataaaagagaatgaatagaaaaaaaaatagtccctggtgtggtggctcacacatgtaatcccagcactttgggagactgaggcgggaggattgcttgagcctaggagatcaagaccagcgtgggcaacataatgagaccccatctctaccgaaaaacaacaacaacaacaagaataacaaatatacacacacacacacacagacacatatatatacacacacacacatatatacagacacacatatatatacacacacacacatatatatacacacacaaatatatatacacacatatatacacacacacacatatatatacacacacacacacatatatacacacacacatatatatacacacacacacatatatatacacacacacacatatatacaaacacacatatatatacacacacacatatatatacacacacacatatatatacacacacacacatatatatacacacacatatatatacacacacacatatatatacacacacacatatatatacagacacacacatatatacacacacacatatatacacacacacacatatatatacacagacacacatatatatacacacacacacatatatatacagacacacacatatatacacacacacatatatatacacacacacatatatacacacacacatatatatacacacacacatatatatacacacacacatatgtatacaaacacacaaatatattaaacacatacacacaaatatatatacacacatatatacacacacacaaatatataaacacatacacacaaatatatatacacacacatatatacacacacatatatacacacacacatatgtatacaaacacacaaatatataaacacatacacacaaatatatatacacacatatatacacacacacaaatatataaacacatacacacaaatatatatacacacatatatacacacacatatatacacacaaatatatacacacatatatacacacacacaaatatataaacacatacacacaaatatatatacacacacatatatacacacacatatatacacacaaaatatacacacatatatacacacacatatatacatacacaaatatagacatacacacacaaatacatacacacacaaatatatatacacacaaatatatatacacacatatatacacatacacaaatatatatacacacacacatatatatacacacacacatatgtatacaaacacacaaatatataaacacatacacacaaatatatatacacacatatatacacacacacaaatatataaacacatacacacaaatatatatacacacacatatatacacacacatatatatacacacacacatatatatacacacacacatatgtatacaaacacacaaatatataaacacacacatatgtatacaaacacacaaatatataaacacatacacacaaatatatatacacacatatatacacacacacaaatatataaacacatacacacaaatatatatacacacacatatatacacacacatatatacacacacacatatgtatacaaacacacaaatatataaacacatacacacaaatatatatacacacatatatacacacacacaaatatataaacacatacacacaaatatatatacacacacatatatacacacacatatatatacacacacacatatatatacacacacacaaatatataaacacatacacacaaatatatacacacaaaaaatatatacatacacaaatatagacatacaaatacacacacatatatacacacaaatatatatacacacacatatatacacacacaaatatatatacatacacaaatatagacatacaaacacatacacaaatatatatacacacaaatatatatacacacatatacacacacacaaatatatatacacacaaatatatatacacacaaatatatatacacacacaaacgtgtatatacacacacatatatacacacatatataatactaaaaaagaaaaagaaatataaaacaaaagaaagcaaaacaaaatagaaagtgtaacaaatatgatgaaaaacaaagatgaagcatttatcctatcgagagacttaaataggctaaactcagaaaggatcagaggacaaatctcaaccttatgagcgaacgtaggagtaaacctaagacacagtgagtcacacggcgttcccgtccacgaggcacgggtgcctcaccaccagcatgctggtgggtgatctagctcccaaatccaactttagaatctactttctcaaactccttttgcaggtcagattctccaggaagtgaatgctgaggtagagatttgtatgcaggaaattctgacgcgagggcccacgggatcggcacctgtggggaagtgaaggcagcagggcagagagagaaggatctgcagcacagttaccgcggaggcttcggctgtggagctgggctggcccctcagagctgtatcctacgggggcacgggacaaaggctttgtacccatgcattgaccagtcattggggagggagagaaggtgaccacggggtccagttgtcttcaggcaaggacatttcccagaggtattgtcttccagaggctggaggacgagtgctgagttctgggggggatcttctggctggtgtgccacagctccactacatcttgttctgagaatttaaatggcttgtatttttcttctagtgatcacctttataattataatttcatataatctacttaattccattccttcagaccaacactgtctaacacgaatgtgatagaatttaacattttctagtaaccacattaaaaaggtaaaaagacacaagtaaaattaattgtaatatgttatttaatacaaatatctgtaaagtattatctttcccatgtgtaatcaatataaaattattgagatatttacactctgttttccatactgctttcaatctctggtgtgtgtttcacacttataggacatcacaattcaaattagccacattttacttgcccgcgaaccacatgtggctacaagactgcacagcacagctttagatgctgacactgtttctatctattgactctagtgtttaaaaaaaatgacattaggatacttctgctttgccctattccccctctcctacataacagaatcctagttaattacattgattttcttcctgtttaacattatgctcttaaatatacttacatttctattattggaataatccatttaaaataatttttttgatggggaatgtgtataactgtaccacttcctattatctctgctcccctcactttttgttaaccataccctttctagtttcaagatttataacatctacatttgtagccactcttcttagatttgatttaatgccagtcctcaaggtgaatggactcagctctcagcatcagttctcttgctgtggcttctccattttctctcagttggctgaaagtcattcttaaatagtttcttcaggaagttccttcaattcttgcatgctctaagacatttgtctgatgtctttattttatttatttattttttgagacggagtctcactctgtcacccaggctggagtgcagtggcgcaatcttggctcactgcaacctccgcttcctgggttcaagcaattctcctgcctcagcctcccgagtagctgggattacaggcgcctgccaccacgcccagctaatttttgtatttttagtagaaac[141 bp omitted]tgggtataaaattatttctccagaccatcttacttcaacattaagtcctccagaactttgtagacatttttctattgacttctagcaatgaatgttgctgaaataaagtctggagagaggcttttcccttttaagtctcttggtcttattatcttgatgcactcaggtataagccatttagtatcatttttcttgggacatggtgagttattccaatatatagatgaaaatcttcttgtaattctgggaagttttcttaaattataaatttaaatatttgctgcgttccattattttgtatctcttcttcgtgaatatcatttttatatatgtagtatggcctttttctagcttccaaatctattatcttctctctgacccttcatgatgatctgctattttcatgcattgtgttagctttgtcaatcctgttttccatgtccttttactattatgtcttctgcaatgtcagttctccttaaggcaatttagacttcattttaactaatttagactttcattttttcttccatttctttcctaaattctgcaacctcatgttaatctccttctgtttcctttctgtatcttctatgaactgtattcctgctttgtgataatttatttaaatatttggtgatttttttttttttttgagagagggtttcactgtcacccaggctggagtgcaatggtgcaatcttggctcactgcaacctctacctctcgggttcaagcgattctcctgcctcagcctcccaagtagctgggattacaggcacccgccaactcgccaggctaatttctgtatttttagtagagatggggtttcaccatgttggccaggctggtcttgaattcctaacttcaagtgatctgcccacctcggcctcccaaattgctgggattacaggcatgagccactgtgcctggcctgtatttggtgatttttaaacaatacttattttctctgtgacatctttatttcaatcctatccttttctttttttttttttctttttttgagagatggagtttcactcttgttgcccaggttggagtgcaatgatgtgatctcggctcaccacagcctctgcctcccaggttcaagcaattctcctgccttagcctcccaagtagctgggattacaggcatgcgccaccacgcctggctatgttttgtatttttgtagagacaggggtttctccatgttggtcaggctgatctcgaactcccaacctcaggtgatctgcccgcctcggccttccaaagtgctcagattacaagcatgagccaccgtgcctggccttaatcccatcctttactttctcatctttgaataagggtgatctccctaaaccagcctttattaggaggttatatgatgatcaagccaggactctgctcctgttagtaggaatccttctgtgacacagtctgtgtgacagtgagttattttagcctttgttgttctctgactcagcaaggctggcacagcagagttgttcagaaggcaaccccatgccagcacccagtttacgggaagattccttcctcctgcaaatatgatttcacatggcagttactcattcagcctgcattcccttcttcctgaagtttcacgccaaaccgaatctatagaaactcctactgccagcctattcctaatattattattattattttgagacggagtttcactcttattgggcaataagatctcggctcaccacaacctctgcctcccaggttcaagcaattctcctgcctcaccctcccgagtagctaggatcacaggcatgcaccaccacgcccggctaattttgtatttttagtagagatggggtttctccatgttggtcaggctggtctcgaactccgacgtcaggtgatccgcccgcctcggcttcccaaagtgctgggattacacgcgtgagacactgcacccggccacctgctcctaatattctgagaaagaattattagtgttgcccccagacgatggatgtattttggaaaactgccctaccagctttgtctgagatctgagcccatagacaccctttcccagcatttctgacacccttagtaaccttccctttatcattaatttgttttcttatcagttcaaggtcacagatgtcatcacgtttcttcaaagataggtgtgggcatctccatttctcattcctgtaacttcttttggatcgtgatgcccctgcaggactacatcgctgtttacttgctcccctattggtggacattccggctgcctcatttttcataccagctgtcactgtctctgtatatctctatctatctatctgtccattgagagagagcacacatttaattctttggttaatttatttgctttttttcctaaacaagagcaaagcaatgttttccagtacaaattttgttgccaaaagtcaagaagaggccaaaagtatagaagcatcgtttgaagctgcagtgcccatagtgaaaaaacaggagcaagttggtctattgaaaaaaagccatgaaattcaacacaaagttctttctttctttctttttttgaaacggagtctggctctgtcacccaggctggagtgcaatggctcaatctcggctcactgcaacctctgcctcctgggctcaagcgattctcctgcctcagcctcccgagtaggtgggattacaggcacccgcca[137 bp omitted]cgcctagccctttaatttaatttgatttatttttaatttttatttttatttatttatttttgagacagaatctcactccatcacccaggttggagtgcaggggtgctatctcggctcactgcaacctctgcctcccgggctcaagcgattctcgtgcctcagcctcccgagtagttgggggttataggcgcccgccaccacgctcagctaatttgttttgtatttttagtagagatggggtttcaccatgttgcccaggctgttcttgaaatcctaacctcaagtaatctgcccacctcagcctcccaaagtcctgggattacaggtatgggccaccacgcccagcccagcaatgatgagttttaaagaatatacaggttattttgtttttattttattttttattatttttttgagacggagtctcgctctgtcgccaggctggagtgcagtggcgcaatctctgctcgccgcaagctccgcctcccgggttcaagtgattctcctgcctcagcctcccgagtagctgggactacaggcatctgccaccatgcctggtgaattttttgtatttttagcagagacaggttttcaccttgttggccaggctggtcttgaactcctgacctcatgatccacccacctcggcctcccaacgtgctgggattacagtcgtgagtcaccgcaccgtgctggttttggtgggcatcacctgtccttggctctaatagaggatgttacagaaatcgtgtaggcgcaggtttaggtgcaggcacaggtgtaggcatagcacagtgtaggtgcaggcacaggtgtaggtgtaggcacaggagtaggtgtaggcacaggtgtaggcatagcacagtgtaggtgcaggcacaggtgtaggtgtagcacaggtgtaggtgtagcacaatgtagttgtagcacaggtgtaggggtagcacagtgtaggtgcaggcacaggtttaggtgtagcacagttgtaggtgtaggcagagatgtaggtatagcacaggtttagatgtaggcaaaggtgtaggtgcattgtaggattaggtgcaggtgtcagcacggggtaagtataggcagaggtgtaggtgcaggcacagatgtagttgcaggtacagatgtaggtgtatattttctcttggaaatagcaaagcaccggccagacatggtggctcacgcctgtaatcctagcactttgagaggccg[134 bp omitted]gaagcaggagaatcactggaacctggaagtcggaggctgcagtgagctgagaccacaccactgcactctagcctgggtaacaaagtgagaccctgtctcaaaaaaaaaaaaaaatcgaagcaccttgaaactctacagtttcaatcccagaatccattacccactctcatgtttaaaagaaagctcctcttcccatgttccctatcttggtaaatggtgatgccaccccatgagaaacagggtactctctgcttctttcagaaacgccacagtctatttatttatttatttattttgagacaaagtctcggtctgtcacccaggctggagtgcagtggcgtgatcttggctcactgcaacctccgcctcccgggttcaagtgattatcctgcctcagcctcccaagtagctgggactacaggtgtccaccaccacgcttggctaatttttatatttttagtagagatggggtttcgccatgttggccaggctggtctggtactcctgatctccggtgatccccccaccttggcctcccaaaatgctgagattacaggcgtgagccaccgcggccggccctgatcattttatttcacccagttctgacactgtacttcctgaagatctctcctatccagccatgtcacctacttccaggctacagagaaattgagagtgccaaggaagccgccactgtctgtggttggcagaatagcacctcaggaacgttcccagcccagtccccagtcctgtgaatgggtcgccttaaatgatcaaggacgttcccaggcctgtgaatgggtcaccttaaataacaagagatttgcagatgggattaaggatgctgagatgagagattatcctgatgacccaggtggcccaaggtcattacagtgtcctcaagagaggaggcaggagggtgagagtcagagagaagaggctgtgctggtggatttgaagatgaaagacctcagcccgcaaccccacaccagggaggcaagcgcctccagatgccagaaaaggcgggaaagggactctcccctggggcctctggaagaggcagccctgctgatacttggactttagcccaagtgagatctactttggactccatcctccggaaggataagagaataaatgtgctttttgttgttgttgtttttgagacagagtcttacagtctctctctgtcacccaggctagagtgcagtggcgtgatctcggctcactgcagcctcaacctcccgggttcaggagcttctcctgtctcagcctcctgagtagctgggattacgtgcatgcgccaccacacccaattaatttttgcattttcagtagagatggggttttgc[134 bp omitted]gtttgttacagcagtggccagatgctaacatgggaactgtctttgtccgtttgccccgctgtaacaaagtaccatagaccggtgggttagaaacaacagaaggttatttcccacagtcctggaggctgcaagtctgagatcagggtgccagcatgatcaggtgctggtgacgggggccctcctggttgcacacaccacctgcttctcagtgtcctcacatggcaggcaggggccactggtgtctcttgatcctcttttataaggacaccaatcccatgcatgacagctctgctccataacctcattgcctccccaaagcctcacttcctaataccatcaccttgagggtgggaattacaacatatgaatctgggggagacacaggcgttcaggccatagcagggactgggggtcttttcctaacctatttgagcctcaatctccacgtctgtggaatggggacaatgataatccctccatcattaggtcactctaaagatccataagttgtgcaacaggtgtcagctgctttgactgtggctgtcgttccgactccgacggtcccgtggcccctcagcaggagcgtcggctgctttgactgtggctgtcgttccgactccgacggtcccgtgggctctcagcaggagcgtcggctggtttgaccgtggctgtcgttctgactctgatggtcccgtggcccctcagcaggagcgtcggctgctttgactgtggctgtcgttcctactccgacggtcccgtggcccctcagcaggagcgtcggctgctttgaccgtggctgtcgttccgactccgacggtcccgtgggctctcagcaggagcgtcggctggtttgaccgtggctgtcgttctgactctgatggtcccgtggcccctcagcaggagcgtcggctggtttgactgtggctgtcgttccgactctgacggtcccgtgggccctcaggaggagcatcagctggtttgactgtggctgtcgttccgactccgacggtcccgtgggccctcaggaggagcatcagctggtttgactgtggctgtcgttccgactccgacggtcccgtgggccctcaggaggagcatcagctggtttgactgtggctgtcgttccgactctgacagtcccgtgggccctcaggaggagcgtcggctggtttgactgtggctgtcgttcctactccgacggtcccgtggcccctcagcaagagcatcggctggtttgactgtggctgtcgttccgactctgacggtcccgtgggctctcaggaggagcgtcggctggtttgactgtggctgtcgttcctactccgacggtcccgtggcccctcagcaggagcatcggctggtttgactgtggctgtcgttccgactccgacggtcccgtgggctctcaggaggagcgtcggctggtttgactgtggctgtcgttccgactctgacagtcccgtgggccctcaggaggagcatcagctggtttgactgtggctgtcgttccgactccgacggtcccgtggcccctcagcaggagcgtcggctggtttgactgtggctgtcgttccgactccgacggtcccgtggcccctcagcaggagcgtcagctggtttgactgtggctgtcgttccgactccgacggtcccgtggcccctcagcaggagcgtcggctggtttgactgtggctgtcgttccgactccgacggtcccgtggcccctcagcaggagcgtcggctggtttgactgtggctgtcgttccgactccgacggtcccgtggcccctcagcaggagcgtcggctggtttgactgtggctgtcgttccgactccgacggtcccgtggcccctcagcaggagcgtcggctggtttgactgtggctgtcgttcctactccgacggtcccgtgggccctcaggaggagcgtcggctggtttgactgtggctgtcgttccgactccgacggtcccgtggcccctcagcaggagcgtcggctggtttgactgtggctgtcgttccgactccgacggtcccgtggcccctcagcaggagcgtcggctggtttgactgtggctgtcgttccgactccgacggtcccgtggcccctcagcaggagcgtcggctggtttgactgtggctgtcgttccgactccgacggtcccgtgggccctcaggaggagcgtcagctgctttgactgtggctgtcgttccgactccgacggtcccgtgggccctcagcaggagcgtcggctgctttgactgtggctgtcgttccgactccgacggtcccgtggcccctcagcaggagcgtcggctggtttgactgtggctgtcgttccgactccgacggtcccgtggcccctcagcaggagcgtcggctggtttgactgtggctgtcgttccgactccgacggtcccgtgggccctcaggaatggacgaataagtctggactgaagagattcagaaggcgctcgagatggtcaatgaaagtgactcggaaaataaacagctggacaagtcgcaggttggatgcaaaaataaatattattgtcctcctcatccttcttttggccttctagcccgccctcccttctccaggccaaaaagctcagaataatcacatacacagggttagggtgcctgagggtgtttactgggagcggaggtcttagaggccaggcctgggttgatcacacttttctggtgatgcttttgggggtggcaagctcatagaggcgaggggacgcctgtcgtatccctcgttgaggcccttgcgcactttgggcttggccagggagatgatccgggggctggccaccaccttcttggtgacatccagcacctcccagcgaggatctcggtcaggaacgcacttgtccgactgagctttgggccctagtgggggcagaagagaaggacagcactgaagctcaaacctcaaagctccacattcaggctgggcatgggagctcacacctggaatcccagcactgtggaaggctgaggcaggtggatcacctgaggtcaggagttagagatcagcctggccaacatgatgaaacctcgtctctactaaaaatacaagaattagctgagcgtggtggtgcgtctctagtcccagctactcgggaggttgaggcatgaggatggcttgaacttgggaggcagaagttgcagtgagcgcagatcgcgtcactgcactccagcctgggcaacagagcaagactccatcttaaaaaaaaaaaaaaaaaaaaaaaaaagctcccccattcaaacggcctgctcatcagcagagaaacggaggatgaaaatgtagtccactcagagtggaatatgactcagccaagaaaaggaacgaggctctagcaccagctacagcatggctgagccttgaggacagcatgtgctgcgagagaccagagacacgaaaggacacacagtgtgtgattccatttatacaaatgtccaggacaggccaatccagagtccggaagtgaacgtgtaggtgccaggggctgggagacgggaatggggagtgacagctgatgggggcggggctgccttctgaaggcataaaaaggttctgaaattgactgtggtggtggttgcataaccctgtgactgtactaaaagccactgaaa[131 bp omitted]gcctcagcctcctgagtagctgggactacagacgtgcaccaccacagccagctaatctttctattttcagcagagacggggtttcaccatgttggccaggctggtcttgaactcctgacctcaggcgatccgcccgcctcagcctcccaaagggctggcattacaggcgtgagccactgtgcctggcctattttttattttatttcattttatcattttattttactttattattttatttcattttgagacagagtcttgctctgttgcccaggctggagtgcagtagcatgaccttgactcgctgtaacctccgctccccaggatcaagtgattctcctgcctcagcctcccgagtagctggggctacaggcgcccgccaccacgcccgactaattttttgtatttttagtagagacagggtttcaccatgttggccaggctggtctcgaactcctgacttcaggcaacctgcccgcctcggcctcccaaagtactgggattacaggtgtgggccaccgtgcccggccccattttattttattttgaggcagggtcttgctgtgtctcccaggctggagcacgatctttagctcactgcagcctccacctgacttgaactgctgggttccagccatcctcccacctcagcctcgcaagtagctggggctacagtcatatgcactgccacatcgagctacgaaacctacacttaaaacagggtgaattacaaataaaaaatatttcggttgggcgcggtggctcatgcctgtaatcccagcactctgggaggccgaggcgggcggatcacaaggtcaggagatcgagaccatcctggctcacacggtgaaatcccatctctactaaaaatacaaa[138 bp omitted]agagcgaagctctgtctcaaaaaaaaaaaaaaaaaaaagaaagaaaaaaaaagaaaaaatattttaaacggccactggcagccaggctcaatggcacatgcctgtcattccagcacttttggaggcagaggcaggaggatcacctgagccctagagttttgaggccagactgagcaacacagcgagaccccatctctaaaaaaaaaaaaatggccacaggtacctgaaagggggactcagggggccacagccaagagagctcaagtctcctcactctgctgccaacacaggtgaccctggttcacccccctctccacctgctcatgtcatggtggtaagtgggtcggggcaggaggcatctcctccccctggctggggtcatgtcttgctccctggtggctgtccctcaggcactcgtggccccctcctcctggtacccccttctcaccatctctcccccaccccttcctttatagcagggagctgcagcagactgcttggagactaggaagaaaggtggccaccgagtctggcatagcagccggggctgtcctctaccttgtctctgaaggcttcagggcctttgatttctgggaaagctcccaccttctttccagatccctctttgcgtggaacttctgcgcaaatgaataagggctacccacttcttggcagaccagccctggctctgtgaagaggctcctggggaaaagagtgtggagtctcttccactaggcaggcagaaccccacgtggcacgtggctgggcaaggccatctgaatggaaactgcagatacagcactgccttagaccatcctgcacgcacccgcgctcaccacacacacacgtcgtgaatataaacatccatatactggtacaggtgtgagtgcttctctggcccctgctctgcatgctaattgtctcttctgcaccttccgggtggatgcgagctctgcccggcagatgcccttgtgcagggtaagggggccaagcagtggggccctggtgaccctaagggggctggaagaaccgtgcccagagcctagccttctttgaactcctctgtgagaatttagtaggcatctgggctttgaaactctgttgagtttccagcactcccgagcagcagcaactgagcccacatagcaagcgtgagcacgcacagagaaacagcacagccacacactcgctcttacccccaccacacagcaagtgtgagcacacacacacagccacacactcgctcttacccccaccacacagcaagtgtgagcacatacagccacactcttacccccacatagcaagtgcgagcacacacagccacacactcgctcttacccccaccacacagcaagtgtgagcacacacagccacacactcactcttacccccaccacacagcaagtgtgagcacatacagccacactcttacccccacacagcaagtgtgagcacaaacagccacactctcgctctaaccccacataggtcagtgcacttcatttgctg[132 bp omitted]aaaacctgtctctactaaaaatacaaaaattagccaggagtgatggcaggctcccgtagtcccagctactcgggaag[137 bp omitted]aagcctcaaccctccgtcattctctcacacacgcatgcacacgcacaaacacatgcatgtgcacacacggatatatatttatatgtacatttgaaacatggatggatgtatccatgcatgtgtgtaccagtgtatcgatgttcatactcaacgtgtgtgtgtttgtggtgagcgtgagtgcgtgcgtgtaccagtgtatggatgtttatactcgccgtgtgtgtgtggcgagcacaagtgtgtgcaggacggtgtaaggcagtgctgcatcagccctcatctgtttccattcatttcactcatcatttcacaaatatcaagggaatggatgaaagaatgaataaacaaagaaaaggccccataagcgaagttaaaagacaagacagagacttgggagaagttattgtgcaatgtgttcaacaagggattaataaccgtcttacataaagagctgctcccaatctacaactccaaaacaccaggcagcaggaaactgggaaaacgatatagaagagtaaacctaaatggccaagcaacttctctggcaattcgcacacattacccttgtcgttgaggaaaatggttattcaacttgttttaaaagacaggaatggagtcaggccaacacccattttaaagctgcatttgttccttagcgtggttctctggttcctgctctgcaccctgattttctcttctacacctttttttcctgctagaaaaccctctcagacaacaccctctgcttccggaccacacgtccctgtgatttctgcttctctttcatgggggagagcttccctctgcccgctctaggcagaggtataaggtgtcccttgggatctgaacaggacatcaggaaatgcctagcctgaggcacctacttactggccaagtgaaggaggcggttatggtctgacacatgtggcttgggttttggcacggggtcccactcttccaagagggtggctggggccttcggctttgacaactggaggatccgcgagctggggactgccatttgggctgccctggatacctgggacacctggaaagagaaatagagagaagggttacgtgaaacagtccatgatgcctcgtgggccctggagctgaaggaccccaggagcaacactgaaagacacaagacagactgggaagaagttggtttgtaatgtattcatgaaaggattagtaactatcacgcataaagagctcctccaaaccaataaccaaaaaaaccccaaaagggctgagcaaagggtacaggagacaaaccctaaatggtcaataaccctgtcttttgaccaatgtaatatcaacaattgttggcaaatgtaaattaaaacaacaaaatatcactccacgctcacaaatttggcaacaatgaaaaagtctgacatgatcaagccctggtgagaggctctcatgcatgactggaaggagagtaaattagtacaggcagctcagggagcaattcgtccactaggttcagctgaacacgcgcaggcttggtgactgccacatacggggactcctgcgcttgacccgaggaagtgggtgcagggatgttccctgcagcttagttaccacacacacaccccggaaggagccgggcgcccggccgctgggggctgcacaagctgactgcagcgcattctcaagagagggcaacccagcaattagaccattttttttctccataaattggcacaaattgctctagaaaacagtaatgagggaaagcaaaacagaagtcatttatggtcacgaacaccacgaaacacgacctaggggacaggatatgaaaacgatggcagtggggcagtgctggccgaggcgggagaccttgcggacgtttcacccagaaacttggcacccttgctccccaaatcaattctcagcagtggccagcacagtggcagccctttggggggtcgaggtggcaggatcatgtgagctcgagaccagcctgggcaacatagcaagaccccatctacacacacattcttggcattttccagaaaacccatagtgcactgaaagtgtgttctttgatgctttgcaccagcctacgcagagactgagtactgcgcggcgctcagacacccttaaactggagctggcttccctcctctcgcctcatacgcattctgttccccttcaccaggcttgctcccgtacacgtgtgtaggagtccgcctgcaaaataactaaggagtaggcaaaggaccgcttcacacgtctcccacttatgctttgctggaagaggaactggccattcctgatgcctctggggagggagggagggagggaaggagggcagctgctgaaatgttttcttccttaaaagggaagtggaggtggccgacccacgcctaactggatgctcctgtccatccattcttggagcgttacctgacagtctgtgattgttggctggtcctaactctagagcctgcgtggaggcagaggatgaaaccatccccaaaggtcactgtgaaatttcagtccctttcttcttgaaattgctcccccataaaaatcacagacacatctctcagcaaagatattgtggtgtttacaatggaagctcccactcagtgatccgtcttctccctccctggctccctccagcctcctctcttcccaccagccctgcggcttccatgcacacagctcaggccgggctgctgaggtagagagactccatttcagtcctgctttcaaggagctccagtcctggaggggcaggccctgattcatccaaaccaactgcagaaagccgttgctcagacaagtgggaaagggaacatggaccgtgcatgttggtatcacggaaccactgttcactttttagtgtgatcagtgttactgggttcgtgttttaaaatgtccttgtctgttagaaattcctactgaagttttatgggagagatgctgtcactttaaacacgtttaactttaaaccccactttaaacaagtggggtctgagaaaccaccataggagaagacgcgaccacacacagtgaggggaatagaagttaatgccacgcgagaaacggccaaaacgtttaggaataatcaggtgaacaaaccaacaagcaagaaagcaggcactaccaccgagtgctgaccacaatggggagagcctgagctcaatccccgcccggagaatgcaagacggcggccaggatgaggcaggcctgagcttccactccccgcccggagaatgcaagatggaggccacgacggggcacaccagagctcactcccctcccagagaatgcaagatggcaaccaggaaggggatcgcctcagttcattccctgcttggagaatgcaagacggtggccaagatggggaagagcctgagctccctctccccacccggagaatgcaagatggtggccaggatgggtttcaggcacatccgtgtgaagaagcctaaacaggctttgtgtgagcaataaaagcttttaatcgcctggtgcaggcgggctgagtccgaaaagagagtcagcaaagggtggtggattatcaattgttcttataggttttgggataggtggtgaagttaagagcaatgttttgcgggcaggggtggatctcgcaaagaaccttcttaagggtgggggacattacaaagtaccttgatcacttagggtggggcaaaaacaaatcacaatagtggaatatcatcagttaaggctatttttacttcttttgtggatcttcagttacttcaggccatctggatgtatacgtgcaagtcacaggggatgcgacggcttggcttgggctcagaggcctgacaacagggacagcctgagctcccacttcccacccaaagaatgcaagatggccaggatacggcgcacctgggctcccactcccggcccagacaatgcaagatggtggccaggatggggagcgcctgagcgcaatccccacacagagaatgcaagacggcggccaggatggggagagcctgagctcaatcccggcccagagaatgcaagacggcgccgtcactttggacaaccattggtcagttttttaaaagttacatatacccagtaactgagaaattccaattctgggtattaccctggagatatggaaacttacgcctccacaaaaagctgtatacagatattcacagttttgttttttttttttgaggcggagtctcgctctgtcgcccaggctggagggcagtggcgcgatctcggctcactgcaagctccgcctcccgggttcaagcgattctcctgcctcagcctccggagtagttgggactacaggcgcccgccaccacccccggctaatttttttttttttttgtatttttagtagagacagggtttcaccatgttagccaggatggtctcgatctgctgacctcgtgatccacccgcctcagccttccaaagtgctgggatgacaggcgtgagccaccgcgcccggcgtattcacatcagttttatcgtaacagtcctaaactggaagccacccaaatacccttcagtgggtgcctggatcggcaaattctggaattgaaccggcgacgacaaggaataaactaccgacgcacgcgagagtctcagatgcagggcggggggcggcagaagccgggtcaagcccgcaggctgcggggttcagactttcggaaaagcaaaaggtacagggcgtagagcgaggtcagtggttgccggtggccaggagtccggcctgagctggggcgagagatgagcgctttctgaacacctgagataagactgttctaattcctgagtgtgagctggaagctttgggatccacccggactgaagcgcagggaaggatgacccctgggcggctctgaagacagtgagagatcaaaagaaagctgctcccagacaaaggcagccgccctgtgcagcttctcctcctcccctgactcccaaacgcaaagcctctttcactctctgccgggtcccagcccgcctggcgggggtgagtcgcggggggcacggggcacccacctcagacatgggcatgctccagaagttatcacgaatcttcggggcggccagttccttcaggcgactcgacgctctgtattccagggaggaccgaggaatgggccagacaggagtcgtcctgggggaggtccccattttagaccagcagctcggccgggggtgggggtgtgtgtgtgtgtgtgtgtgtgtgtgtgtgtgtgtatgtgtctgtctgtctttcccagctcctccatatgtgtctgtctgtctttcccagctcctcctctgtttctggggttaagagagcctgggagagtggtgagttttgaaagcgtctccaaacagggattcgtaaagaatttctaagagttctcaagtacagagctaccatctcccagggttgtctctgctcaatgtgcaacgtccaccctcaggtccaggccttctccattcccttctgggacggcagctcctcccaggccttctctacacacccccatcatcaagagcctggcgtgagcacttggacccaagggatgaaagtgtctgtcctgaggttgcaaagctggggaaagcgaaggacagctgagctcccggggctgtgccttctgaaatcaggtctcagctatgcctctgctcggaaataaagccgcatttcattgattctaaggcaaggtctccacattgaacaggtctgaggttaggatgcagcttacgagtgctgccagccagatggcggaagtgtcctggctacatctggctgcatctgtgtgtgctgttcacgtgatctgcactgctgcttctacaggagttaagtttaattacagtttaaattgtcttcaggtcacagtatgatttggcgttaaaaagtgcacagaggcgtgaggacagtgtgtgcgacacccacatcaacgtctgtgtcagaagtggttcaaaacagttggacacacttccgctgtctacttcagctgtgctttccttcatacgctgcataaaagatgggtaattatatgttgtgtctaaataactaaagatcacttttaacaagcacaggggctgtaagtggtaagaaagaattttgtacataaaatactaatgtgtcttagaatttccaccttttttgagtaaacaaaatacagtcacaatggtgataacatctgagcacgcactgtgtcaggcgctgtgcaaatccccgttcacgggtgccctccaccaccattccacagctggcaatgcagttgcacggggccaagcagcctgctggggatgtggactgggaagcagcctgctggggatgtgggctgggaagcaggccagccccgtctgaacaccagctgtctagggctaggacctggaccctttcccacacagcatcctgtcaggcgagaataaggcatttctgccaaactctgccttctgagtagccacccagccctccttcccccacctgttgttgttgtaatattccaggtagaatctcttgggccgagacagttcctccacgcggcgggacaccgctatgcaaaatgggaaacggagtcagtgaaccccagtgtcaacaccctgcagttcccaggggcttctgcatgcggaattcagcttttcatgagcttgggcaggaggctgaattggaagaactgtgggcagagacaactgggggccagacaccctgcagagagaagatttgctgtccctgatttagggacaatgggctcagaggcttgaaggtcctttctcggacaccggatgggagtggcagggctggaacagcagcccagcaccgtggctcctcaacggggctcaatacagatccagggacccacaggctgggaaaatgggttttgttctgaagttagtacaagcctggggtttccaggggcctagtgatgactgtaggtctaaagtcaagaacagcacaggagagaactggactgttattctcctctatggggaactctcgaagtgtctcatttgaaggtatctatgatacctcaataccaaattcctctcaagaaaagcatggaaatcattgtggaagggaaagcaaagggtctttttgtaaattcttgccccgatttggccctatcctagagagtgttccccatgcccctcacccccaggaccagtctcagctctagctcctcaggggacagactccagtggggaggacagaggctccgaggagatggggcaagggaggccagaagtatctagatggggcggggcaggttccctggaggccggcagccgggggcaggggtctcagcaggcacgggctccacctaccgggcactgtgatggtgagggtggtgtcctcaaggaaccgctcggtccagtacacagagggcctggaataagcggacggctcagggcaagggaggcagagagccctggccctgcccggaaacaagcctgggtctctgccaggagggtggccgaggtggggtgtggagttgctgggagagggggtaggccagagaaggacagtgggggggccggcgggacgcgtggattattgtgagcaaggctgatgtccagagaaggaggtagctgggggagaagcatagctaagaagagggcccagggccacctcctgggagcagacccaggtcacaagggtggagagccccacatctgaggagccctccctgatcctcctccctggagagaggagggtggctggagtgaaggggtcccctggaacctgacacgtgtcccccagcataggcacacggcggagacagccctggacttaccagcagagacagaagtgcaagctcatcttacatggggagatccaggcataccccttaccacagcgtcccttcctgcgaggagacagggtccgagccccactgcctcttgccctgggtctcccgtttgctcccaaactcctcactctcctttggccaccgcccagagggccaccgttccctagccactcccagtgtctggccacctccttaactggccaaccccacctaccctaagtttgctggatgtggtggcagctgggggaggggagccgagcagtggggacaggaggagcccgggaagggtgcagagaaagccgcccacgctgcccctacgaggccgtggtctggcgtgtcctcacctgtctttcaggacttgccagtttatcttgggctctgccagctccatgagcctcctccgcctcctcctcttccttgctttggtcatggtggtgctggggagcttctggctgatggacagccggctttgggagaattccacgttgaagttggagctgctttcccgccccgatgcgtttgggagcccagagaagcgtgggtcttgctcaagcgccttttgtctgcactcaccctgcccacccgcctctcctttccctcgaggggtctctgagggaggactttggcaccacgaaggcctggaccaaccgcagctccactgctcgctggatggaagacccgtccaggtcacctgtctcccctggtcctcagcttcctcctctgtgaattggaggtgagaccagctcccacctggcggggctgttttggtgagtactaaggtagtgtttactcatctcacagacatctgtcaagtgcttactgtatgccaggccccagaggggcaaccaccctctaaagagagcggctcctgcctcccagaaagctcacagactgtgggagggaaacaggcagcaggtgaagatgccaaatgccaggatatctgccctgtccttgcttgatgcagctgctggctcccacgttctccccagaatcccctcacactcctgctgttttctctgcaggttggcagagccccatgagggcagggcagccactttgttcttgggcggcaaacctccctgggcggcacggaaaccacggtgagaagggggcaggtcgggcacgtgcagggaccacgctgcagggaggacgggagccgagtcccagaggtatgtagagtgcgcgccttgctggggacactccagcaactgcccaaaatcagcgcccccagtgctgattggccgaagcgtcagttcacccagaacgtgttcctcccgaccatttaaaaccttttagccacgtgtggtgcttagaatggtttcaacttttgagttgggaggctttttttttcccatttcttattctctctgtctgacttgaggccatcactcgctaaactctgaactctgggcacctgaactcagtctgcctgactccaaactcagcgctgtttactcctcctcctgccaccagataggggagcgtctgctggtgtctgcctcagggcccagtgaggggtgctggccgccaaccgaccaagcccacacctaggctgactcggcagggccgggcccctcgggagcagcgagccaggccggtggccggttacgaccctttcgcccgcccagggggctgctgccctccccccactgccaggggctgagccctaccccaccgcacccaggcaggcccgttccccggtgcccacctgatttcaggaatgtcctcttccaagtccttgtccaggactctctccaactcagaaagtgcctctttgggatccagggtctccgggaactcctccccggccacctcctcggggggaagctcctcttctgggtcttctggtcccagctctgcattgtccaggtcctggcgttcggggtctgtgacccgccggctctcgtacacagagctctggaggccacgggggtcgccgtcctgctccctttccgacctgcccgcagcctcagagctgggctggttcccgagtgaccttcgcctgctgtcccccatacaccggtcccttcccagcccccgcggcctcactctcccggcacccaaatgtgtctgtggtggccgcggcaacaggagagcgtccgtcacattccccacggtccacattctaacccgtgcgccgtctccaatgctggtcacctgggcttgcgctgggatcaggactcagtcctggtggtcacggctcactcaggacctcccaggattggtttaggaaggagacctgacgggaacctgcaggggcatctagctatggattccctctctcaaaaggagacacaaggaagagaccgcgtctcctgttcctgtccctgtggggcccgtcggtaatgtccagagcccaggcagccttcttgtgaccatgaggcctgccatctgagggcagatgaactgaaaggtgggcctttgatgtggctgtcgagcctctgaacttagcagccttggaatccactctgtgtccaggcttcttgttacttgaaacagtaagtttccttagtactaagtcgttttggcttggtttccaattcctagcagctaaaactgcaccctaggtgatacagacgcttccagccccaacctctcatgagaaataacttcaaaataggctgttccaaccctcacaacaaaataatggttataactggagtattccccaggctgctgccttcaggaattcctcgtacgtcgccaaaggagctgaatttccagcctctccccctctgtgccccacccagcctctccccctgtgtgccccacccagcctctccccctctgtgccccacccagcctctccccctctgtgcccccacccagcctctccccctccgtgccccacccagcctctccccctccgtgccccacccagcctctccccccccgtgcctccacccagcctctccccctctgtgcccccacccagcctctccccctctgtgccccacccagcctctccccctctgtgccccacccagcctctcccccgtgtgccccacccagcctctcccccctgtgccccacccagcctctccccctctgtgcccccacccagcctctccccctctgtgccccacccagcctctccccctctgtgccccacccagcctctcccccctgtgccccacccagcctctcccccctgtgccccacccagcctctccccctctgtgcccccacccagcctctccccctctgtgccccacccagcctctccccctctgtgccccacccagcctctcccccctgtgccccacccagcctctccccctctgtgccccacccagcctctccccctctgtgccccacccagcctctcccccccctgtgccccacccagcctctccccctctgtgcccccacccagcctctcccccctgtgccccacccagcctctccccctctgtgccccacccagcctctccccctctgtgccccacccagcctctcccccctgtgccccacccagcctctccccctctgtgccccacccagcctctccccctctgtgcccccacccagcctctccccctctgtgcccccacccagcctctccccctctgtgccccacccagcctctccccctctgtgccccacccagcctctccccctctgtgccccacccagcctctccccctctgtgccccacccagcctctccccctctgtgctgtgtgcccccacccagcctttcacccttctgtgcttggtggttttctactcatcattgaagactcaagcctgtcggtcccccacgcagggagagtccctgaccatccctcccctttctgggctcccaggcctaggacccccacccctacccccacccagtgctagcccaccccgaggactgctctgtccctcacccctgccaccagcgtggggccggccctccgggcatggtgaccactcggcacgcaagagacccagttcatcgacacacacaaagccctctccagctcccatcccatctccctgatgctctgctcccagacgcagcctcaccaccacctctgtcaggaaaggggtctctcggaggactccaggcagaagggccccggggaggatccggtcccatcaaggaggccatgggaaaatcccctttcttggccggaagtctcgtaaacccttaccttgcactcaatgatttacttttctctcttaagttaaactggatcaagatctgcgggtgcctttcacaaagagatgagttaggcattgttgccgctggagggcctgtggccactgcagtgtttccaggagacctcgttcagagcagggcgccgcaccccgaggctgctccctaaccctactccagggaggcgcggttgggggtctggcagcctccggctctcagcacccaggcagcacccaggctgcagcgcgtttagccctcatggcagcccgttgtggagaggagaggcagatgagcgctccagggtcatggggaagctcccagggccacgcggctggtggagctgcacccggcaccttctcgggggagtcagggctggatgtctctacggcaggagccggaggagctcaggagcgcgcggggacagcagaactctgcccgcactcgggggagagttggagggtccacgtctgctccaacatcctgtggaaaagcaagacgttcacagccaaggaagtgcatgatttctgaatgttgtgtgatgttgctttgagcagaaaatagagggggacggggaccgggctgtgggatgtgtggggttctgactgcccggacctggggcgtccgcctggcagaaaataaaccaggtccctactgtgttcctctctgctgtggccgccttaacacatatcacaagcagaggctccagcaacactgagcgattacctggccgccctgggctcagaagcccaacatggatctcactggactcaagccacggtgtgggcagggctggttcctgcagccttcagaggaaggcccgtctcctgctcatttggtggccacagaattcagtgccttgtggtcgtaggactgagatctgcgttcttgctgtgtgtgtcagccgggggcccttcccagcgttgctgtgtgtgtcagctgggggccccccagcacccagaggccaccgctcttctcagtcctggcccctcgctccattttcaaagccagcaacggccagtcaagccccctcacatggatgctccactggcactcatctctgagcagggctgggaaacccgtttggttattacggaaacaggtgattgaaggtcagcctggataagccaggtgctctgaccctccacgtctgcaaccccagtcccacctgcgaagtccattttgccacataaaataacatgctcccagtgtcaaactcaaacgagcacatagagaggcatttttacgtaagacattttgtttgggaaaatacataaaaacagaattgagacctggcgcggtggctcatgcctgtcatcccagcactttgggaggct[133 bp omitted]gaggcaggagaatggtgtgaatctgggaggtggaggttgcagtgagccgagatcacgccactctgcaccccagcctgggcgacagggcgagactccgtctcaaaacaaaaaacaaacaaaaaaaaaccaaaaaaaacagaattgcaatttcgggcctgtacacagaccgggaggtcttcggtatatctgcagcaggttggggcttttactagaaggaacaatgttgcgaatcatttcgaaagaaagctcgcaagaactggaagctttgggagctggtgagctgtgactgggagggaggtgggggcagaagggacctggtgagctgtgactgggagggaggtggcggcagaaggcgtcttcatttagctgaggtcacctccacagctcccaggtcaaattggctttagggtcacggcaggcggtttcgggcgctggcctgtgacgccgtcctgggcaggcgcgtgcatctgaatgctttttacctggtctctcgactgttgcgttgggtaactcccatccatatcaccagtttcacaccaggttccagggacgaggatgtggacaccgttggggatcactattccttctgtgacacctacctcataccacacacaacagccctcagtggatacgtgaaagctgaaacacaacttcaaaacttacagaaaaaaatgaatgtgaccatgcttttgcgctccatgtagggagtaatttttttaacaagacatgtagagtgctaatcatacacgaccaataagtcggccatattaaactgaagcctcatgttcaggactcctcaaaaaagtggaaacagaagccacgaatgggaatgcagcatctgtcacatctataattgattagtacccaccatgaataaata[133 bp omitted]ggtgaaccccgtctctactaaaaatacaaaaacttagctgggcgtggtggcgggcgtctgtaatctcagctacttaggaggctgaggcaggagaatgacttgaacccaggaggcggagtttgcagtgagccaagatcctgccactgcactgcggcctgggttacagagtgagactcctctcaaaaaaaaaaaaaaagagcagaaccctggtgatgagcagatgtaggacgtggggcagaaccgtggtgattgatgagcagatgtaggaggtggagcagaaccgtggtgattgataagcagatgtaggaggtggagcagaaccgtggtgatgagcagatgtagggggtggggcagaaccgtggtgatgagcagatgtaggaggtggagcagaatcgtggtgattgataagcagatgtaggaggtggagcagaaccgtggtgatgagcagatgtaggaggtggagcagaatcgtggtgattgataagcagatgtaggaggtggagcagaaccgtggtgatgagcagatgtaggaggtggagcagaaccgtggtgattgataagcagatgtaggaggtggagcagaaccgtggtgatgagcagatgtaggaggtggagcagaaccgtggtgattgatgagcagatgtaggaggtggagcagaaccgtggtgattgatgagcagatgtaggaggtggagcagaaccgtggtgattgatgagcagatgtaggaggtggggcagaaccgtggtgatgagcagatgtaggaggtggagcagaaccgtggtgattgatgagcagatgtaggaggtggagcagaaccgtggtgattgatgagcagatgtaggaggtggagcagaaccatggtgattgatgagcagatgtaggaggtggagcagaaccgtggtgatgagcagatgtaggaggtggagcagaaccgtggtgatgagcagatgtaggaggtggggcagaaccgtggtgatgagctgatgtaggatgtggagcagaaccgtggtgatgagcagatgtaggaggtggagcagaaccgtggtgattgatgagcagatgtaggaggtggagcagaaccgtggtgattgatgagcagatgtaggaggtggagcagaaccgtggtgattgataagcagatgtaggaggtggagcagaaccgtggtgatgagcagatgtagggggtggggcagaaccgtggtgatgagcagatgtaggaggtggagcagaatcgtggtgattgataagcagatgtaagaggtggagcagaaccgtggtgatgagcagatgtaggaggtggagcagaatcgtggtgattgataagcagatgtaggaggtggagcagaaccgtggtgatgagcagatgtaggaggtggggcagaaccgtggtgatgagcagatgtaggaggtggagcagaaccgtggtgatgagcagatgtaggaggtggggcagaaccgtggtgatgagctgatgtaggaggtggagcagaaccgtggtgattgatgagcagatgtaggtggtggggcagaaccgtggtgatgagcagatgtaggacgtggggcagaactgtggtgattgatgagcagatgtaggaggtggagcagaaccgtggtgatgagcagatgtagggggtggggcagaaccgtggtgatgagcagatgtagggggtggagcagaaccgtggtgatgagcagatgtaggaggtggagcagaaccgtggtgatgagcagatgtaggaggtggagcagaatcgtggtgatgagcagatgtaggaggtggagcagaaccgtggtgattgatgagcagatgtaggaggtggagcagaaccgtggtgatgagcagatgtaggaggtggagcagaaccgtggtgatgagcagatgtaggaggtggagcagaaccgtggtgatgagcagatgtaggaggtggagcagaatcgtggtgatgagcagatgtaggaggtggagcagaaccgtggtgattgatgagcagatgtaggaggtggagcagaaccgtggtgatgagcagatgtaggaggtggagcagaaccgtggtgatgagcagatgtaggaggtggggcagaaccgtggtgatgagctgatgtaggaggtggagcagaaccgtggtgattcataagcagatgtattaggtgttgctgttgctggggctgtggcaggaagtggttgatcacattcctattctccagttgggtaatgagctcatggttgaatcgtgaatgggtaaatgaatgggtggatggaaataattatggttcacctaattttatgcccctaaggtccttgcaaaagaaaacggagggaggagagagaggagaaaggggaagaagtcgcattcaaattcactctcgccagtctctaaaatggcagattcgttttgaaacaactccagattaagcctacagagggaaggcatggctgattctgctgagcacctattacagcttcagcagcatacctcgtttcggtccacaacagctgtgtaagattgtgacggagctggaaagttcctgttgcctagtgaggtcatgtcctagcgcagaacgcagaatcacgaagagtgacgaatgcccgccgtcaactgctggccgggctgcgtgtcatgcagcaacgcacaacggaagcacacccttctcctgttcccagtggtcagagccacccaagtcgggggtgtgggcccccagcacttctacttcaggatggagaccccctgctgcctggctccctccccaggcccgccaggctagtcccctcccctgtccctctctcaggcctgctctcatagccacgcgggcctttctgctgcacacgccagctcagttcggggctcagtaaccccctcccaattcaggggcatgactccttccagattctccttaaatatcacctcctccaaaaagccttccccaatcacctcgtctaaagtagggccccctcatttttctacctaaatctatggggagtttgtttgcttagttgcatgtatcatgatcttgctttgtgttgactttttacatatttattgtctttttatctcattagcatatgtgctccaatagggtggagactgtgatttatcttgttcatgcctggacttccagcagcattcagaacagaacttctttctttctttctttcttttgagatggagtttcgctcgtgttgcccaggctggagtgcagtggtgcgacctcggctcgccgcaacctccgcctcttgggttcaagcatttctcctacttcagcctccggagtagctgggattacaggcgcgcgccaccacgcctggctaattgtatttttagtagagttggggtttctccgtgttggtcaggctggtctcgaactcccgtcctcaagtgatccgcccgcctcggcctcccaaagtgcagaagagaattccaggaagcctcgagagtgagtgacggcccgcggcccccggcgaggaggcagcaataccacaggcgaccaccagctgccgccgcagtcaagggcagttggtctcccctcgccaggattaaccctggaccgagggctcccgaaccgaatcgtccccacagcctgtcctgcgagggcggctttccccattaccaccctcgtttcaccaaggagaaaacgagctcagagaggcagtgcattggcccgggattgcaccgggcgcgaacccacgtcagctcccgcagaacctagatcattcgctgccacctccctccgggcctgctctcgcagtgttgggtgggaacagaacagccttggtcgtggctgaggagaaatcccacagatgtcactggacgagggtgacgggtggggccgggctttcccctgggtacaggcacaaccgtgctcttccctcgcacagtgacccgcggtgtcatccacaattcacagcctgtttcccagaggaggggctcggagcggtgccctccaggtgccgccagcaacacaaggcccagactacagaacaccaaatactgtgatgagaaattacttcccttttccttcagggccagtcctggctaccccaaggggaaagtcgcagcttggtgcaaatgaaagttcaactgtccccagcattgtcaatggtttttacagagagagagcaggcccaagcctggggcagagcataggagctggttagtaaccttgttttgttctcactgctgtttgtttgcatgcctttctggctttgtttgtgttgttgttttgaaataattgcgaactttcaagaaaagtagtatcattttgaaagaaagctccctggaactgatgaagtgggagggaggtgggggcagaaggcgcctggtgagctgtgactgagagggaggtgggggcagaaggcgcctggtgagctgtgaccgggagggaggtgggggcagaaggcgcctggtgagctgtgactgggagggaggtgggggcagaaggcgcctggtgagctgtgactgggagggaggtgggggcagaaggtttctttgtgtcactgaggtcacgtcggcaaacatagttatcgttatcctcctatttgcctagggaaagcaccaggatgtttaatgcctacagtccaaaattggttggtggaagtacctactgtcagtcccatcagtagattcacttatcacatggtaagcgggatgtcactcaggccacgggtaaattatttacaagacttttcttatcaaagatcattaaaatttagacctatagggaaaccttgccccaaggaaattcccaaaggatcaaaaaatacagaagttttagtttggaaagaatgtgtggccaatagtgcggtgatattacaaaacaatgaattcggaactattatagattgggcacctcgagtcaattctaccacagttgctcaggacaaactcggtcgtgtccaagtgcacaagtgagtccagctgttgatagcgacttaacagaaactctagacaaacataagcataaaaaattacagtctttctacccttgggtatggggagaaaaaggaatctctaccccaagaccaaaaataataagtcctgtttctggtcctgaacatccagaattatggaggcttactgtggcctcacaccacattagaatttggtctggaaatcaaactttagaaacaagagattgtaagccattttatactatccacctaaattccagtccaacggttcctttacaaagttgcgtaaagcccccccttatatgctagttgtaggaaatatagttattaaaccagactctcaaactataacctgtgaaaactgcagattgtttacttgcattgatttgacttttaattggcaacaccgtattctgctggggagggcaagagagggcgtgtgggtccccgtgtccacggactgaccgcaggaggccttgccatccgtccgtattttgactgaagtattaaaaggcgttttaaatagatccaaaagattcatttttactttaattgcagtgattatgggattaattgcagtcacagctacggctgctgtagcaggagttgcattgcactcttctgttcagtcggtaaacttttaatgattggcaaaaaaattctacaagattatggaattcacaatctagtattgatcaaaaattggcaaatcaaataatgatcttagacaacctgtcatttggatgggagacaggctcatgagcttagaacattatttccagttacagtgtgactggaatacgtcagacttttgtattacaccccaaatttataatgagtctgagcatcactaggacatagttagacgccatctacagggaagagaagataatctcactttagacatttccaaattgaaagaacaaattttcgaagcatcaaaagcccatttaaatttggtgccaggaatggaggcaatcgcaggagtggctgatggcctcgcaaatcttaaccctgtcgcttgggttacgaccatcggaagttctatgattataaatctcatattaatccttgtgtgcctgttttgtctgttgttagtctgcaggtgtacccaacagctccgaagagacagcgaccatcgagaacgggccatgatgacgatggcggttttgtcgaaaagaaaagggggaaatgtggggaaaagcaagagagatcagattgttactgtgtctgtgtagaaagaagtagacatgggagactccattttgttctgtactaagaaaaattcttctgccttgagattcggtgaccccacccccaaccccgtgctctctgaaacatgtgctgtgtccactcagggttgaatggattaagggcggtgcgagacgtgctttgttaaacagatgcttgaaggcagcatgctcgttaagagtcatcaccactccctaacctcaagtacccagggacacaaacactgcggaaggccgcagggtcctctgcctaggaaagccaggtattgtccaaggtttctccccatgtgacagtctgaaatatggcctcgtgggaacggaaagacctgaccgtcccccagcccgacacccgtaaagggtctgtgctgaggaggattagtaaaaggaaggaatgcctcttgcagttgagacaagaggaaggcatctgtctcctgcccctccctgggcaatggaatgtctcggtataaaacccgattgtacgttccatctactgagatagggaaaaaccgccttagggctggaggtgggacctgcgggcagcaatactgctttgtaaagcattgagatgtttatgtggatgcatatctaaaagcacagcacttaatcctttaccttgtctatgatgcaaagacctttgttcacgtgtttgtctgctgaccctctccccactattgtcttgtgaccctgacacatccccctcttcaagaaacacgcacgaatgatcaataaatactaagggaactcagaggctggcgggatcctccatatgctgaacgctggttccccgggtccccttatttctttctctatactttgtctctgtgtctttttcttttccaagtctcttgttccacctaacgagaaacacccacaggtatggaggggcaacccaccccttcacaggtcaaattggctttaaggtcccagtaagaactctgtgtgtccttcacctggtcacccgctgtgaacgacctgccgccctgtgttatcctcctgtcggttttttcctgaacatttgaagctaagttgtagatgtcatgcacctccacccctaaaaatttcagtatttatgtatttctttatttttgaggcagtgccttgctctgtcatccaggctggagtgcaacagtgaatctccacacactgctgcctcaacttcctgaggtcaagcgatccccccaacgcagactcccgagtagctgggaccacaggggctctgagtctcagcgtcggccgtgtgtcctcgagtacacatcagggtctcagcctcggccacgtgtgtctgtgagtacacagcagggtctcagcctcggccacgtgtgtctgtaagtacacggcagggtctcagcctcggccgcgtgtgtctgtgagtacacggcagggtctcagcctcggccgcgtgtgtctgtgagtacactgcagggtctcagcctcggccgcgtgtgtctgtgagtacacggcagggtctcagcctcggccgcgtgtgtctgtgagtacactgcagggtctcagcctcggccgcgtgtgtctgtgagtacacggcagggtctcagcctcggccgcgtgtgtctgtgagtacacggcagggtctcagcctcggccgtgtgtcctcgagtacacatcagggtctcagcctcggccttgatcatctatccttgttatataataagctcacataaattagtaacaggtcaaaaccccggcaggaggatgagtgagaacttggatgagcaagttacaaatggaagaaatacggtggccaagatcttaggaaca[213 bp omitted]gagggagaagaatcacttgaacccgggaggtggaggttgcattgagctgagagagacagagagacgtgcagggttgacaaggatgggctggcgtgggggcaggccccacaccctcagccctgcacgggcgcagccctcagaagggaactgggcggcaggtacctgcatcacagatgctccgtccttgggcccaggatcttcacccccagtcatctgtcttgtggagtgtgtcgctatgaagaggtccctgaggctgggtcgttcataacgaagagggttcatttgctcacggttctgcgggccgtacaggaaatgtgacaccggcctctgggccgcttctggggaggccggggaggtttacccatcaaggaaggtgaagagggagctggtgtgtcacgggtgagagggagcaagagggaaggtgccgcactcctaaatggctctcaggtgagcaacaggcaggacgggggacggtgccgcactcctaaatggctctcaggtgagcaacaggcaggacgggggatggtgccgcactcctaaacagctctcaggtgagcgagagttagcaagggggaaggtgccgcaatcgtaaacagctctcaggtgagcaagaactcaactcacgtgtcaccaagggcatgggctaagccctgcaggcgggatctaccccgtgagccagcacctcccaccaggcctcacaccaactctgggcgtcacatttccgcatgagatttggagggacacatgtgtccaaacatgtcacagagcacgtagtcagtgacgttcacacatgaatattcatcccagatttactcatggtaatgaaaccctcaacacgacagcagagtttgggtgtgttcctaagagcgggtggtttgcagatgttcacctcatccaaaaacatcctcacagacctgcccagaatgatgtttgaccaaacttctggggatcctgcggcccagtcgagttcacacaaaaaattcaccaacacactcggcattccggggaagctggggacgcgtgaggggccaccaggtggctgcagagacagtgtctgagctgtgaggtctattttcagcccaaagagtcggcttctggggaacagcccaagatgcccttggaggagaggctgggacgagtcccccagtccctctgcagccccaacccccaacccagcccttgacaagcccctcccctccagacacagggcaatgcccctctccgtctctctgtctctctctctctcccctccctctttctctgtcctccgtgtgtctgcctgtcctctgagtccaccactggcctcttgcacgtgccctgcccgtggctcctgccctcacgtctctgctcgctcccgtatcccccatgagctggttctgggaggccgcggtctggcttgtggggacccatccatttctctcctggggcctgagctggggttggggttctagagcagcgcaggccaagaccccacggtaatgggagacagaggtgggtagagcgtggcctccaagacatgattctgaacaatgcagacccatggctgtaacagatgcagcccatgtagcctgagagtagggtcactgtacaactacagatgccatcaacaaaactccgtgtagcaacatcctcccactcagtcctcgagcagccctgaaggcacagccaccattgctccctgtcacagatgggaacaccaagacagccaccattgctccctgtcacagatgggaacactgaggcgagtcctcgagcagccctgaaggtgcagccaccattgctccctgtcacagatgggaacgcggaggtgcagggacatcggtggctccccagggcccggctgtgagcagctctgatgtggcagccccttctccccagcattggggtgcggtcaagcccgcggactgggcaaccgggctctgcttcctccgcgcttgccaagagcctcagaaggaggccgttcctcatctgtgcacacgagggctggacacagacacacagcacactgcgcccacgccatggccagcctgaggcagacatcagcagccgaatgctgagggccacactgtttccctctgagccctggcaaggcctcagaacccttctcaacccttagccaaggccaagtggtctgagaggcccaggagcttcactctgtggtcctcagggtgccattaacccgaccccagggccagcggcacctccaggcctggccccccggcccccgccccggcccccgccctggctggctcccagcccacgctgctccactgcaggcccggccagcagcatctgttgccatggtacctgctggggtagcaaggcccccccacccacagtgggacatcaccacagcagccggtgagatttaaatgcaggcagcggattagatctgagcgttgtgtggatgtggaatttcccgatgttgacaacagccccagggttataaaagagaatcctggtttttagaaaagatacgctgatatgtttaggaggaagtgggcattgcacctccagcatagtcttcaatggttctgaaaatgtgtataaatatgaatattgtaccatatgtagataacaggtggctgtagatacagatagaggtacagacaccgaagatgacacagcaaatggggaaaatccagcccgctggtgactctgggtagagtcagggggagttcctgctgtatgacaagtaatcttgccactttcctgtaaggtcaaaatgatatcaaaactaaaagatgtgaaaacaatattcaaagcatagagtcttgggccagccccccaccttacctcctacagagaccccaactctgcaggtctagatgagctcagactttgatttaatcagcatcaaggagagtatgatgggttgagttgtgtctccccccaaaacacggtccatccctggaacccatgagtaggaccttatttggaaataaggtctttgcagatgtgatgagttcagatgaggtcaccctggagtccggaggaccctcaatctgatgaccggcgtctctctaagatgaggagtgggctcacaacactctcaggggcaacggccgtgcaaggacagaggcagagactggactgaggcatctacaggccgagggccaccggccaccaccaccagctggagaaggacacagacgcagtctccctctgagcctctggaagaagccagccctgccgacacctggatggcaaagctctggcctccagaaccgggaggacacatctctgctgtgggaacacccaggccatgtgcctttgctacggcagccccaggtggcagctgctcagtccgcgaggaggggcagcactggccacgtccaaaagcttccggaagagcgggcagggtcctgcacagctgttcattcacccgcgagtacgtcaagcatacattgggcaccgactgtgtgccacgcccgtcccggcagaggccctggggacccagctgtgaacaaaatcggcaaaatccctgccctcctggaggtggcgtcttagtggggaagacaggcaagaaacacgattggtgaattgccgggagaacgcggcagggaggagatggtagagtcgtggggaaggcaggaaggtagggaggtcggagaggccttcccaggaaggggactttggacaaagacagaagtgaaggaggtgaggaagggactgggaggtgatcaggggagagtgcaccaggaggaaaagcctggaggtgggatggggccagagcctgcagggacagcggggagataccaatacacaatggggtgagtggggctggggaggagggcatcggcgtggtccccattccgtggggcccgtggctctacaggaacagccgtccctgagtttggatagacgtctatgcagccctgtgccaggcaggcacctccctctctgcagcagctctctctgggcctgcaggctcctcagaacacgcatgcctcgaaggtcttccctggccttaggggtggagtgtgtgagggtctccacgtgagggaccacgtgggcaggcagtgccggcagccctgccccatgtgctggtgtaatctgaggtttgctctcccgtcgcccaccctcattattgtgcaattaaacacttgaggcagaggatgacgaggttaaaaatagcccttcctttcagccagagagagcccgtgagtgtgagtgggtgtgaggagggcctgggggccgtggaggtggtgtctgcagctgcctgtgaaggtgggaagaggccccaggcccccatcctgttgatttctcagaaaaacatctgagcaccttggccatcacacacatttattccgctaaaacttgaacacttgctgtgtgtcaagcacggttctgggcctgggaagaggctgggaggtggtcctggcccccacagagtgctgagaagaaagcaaaggagagttgggggaggatggaggcagggaaggccactgaggtgaaggccgtgagggtgtctaggaagagcacagcatgagcaaagactctgagaccaacgtgcctgctgtgcagatggaaccaaaagcaggcccatgtggctgcagcagactgagtaagggagagaaagggaggaggtgagagcaaggaggtggccaggcaggtcattcagggcctggtgggaatgggaaggagttgggtttttaccgtgacagagatgggagagacggaggtcagtgtacagagtcagcaggtggcaggcctggtgctcacagtccagagaccagggatgaggcaacagagctggtctagggacaaacaatggaacagatgataaggaaggatggtgggggtgtgtgatgatggggaaggatgacggtgaaggatgataggaaaggatggtgggaaaggatgatggagaaggatggtggggataggtggtgatggggaaggatgatggagaaggatgatgggaaggatgatggagaaggatggtgggaaggatgatggggaaggatgatgggaaggttgatgggaaggatgatgggaaggatgatgggaaggatgatgggaaggatgatggagaaggatgatgggaaggatggtggggataggtggtgatggggaaggatgatggagaaggatgatgggaaggatgatggagaaggatgatgggaaggatgatggagaaggatgatgggaaggatgatggagaaggatgatgggaaggatgatggagaaggatgatggagaaggatggtggggataggtggtgatggggaaggatgatggggaaggatgatggagaaggatgatgggaaggatgatggagaaggatgatgggaaggttcatgggaaggatgatgggaaggatgatgggaaggatgacgggaaggatgatggggaaggatgatggggaaggatgatggggaaggatgatgggaaggttcatgggaaggatgatgggaaggatgatgggaaggatgacgggaaggatgatggggaaggatgatggggaaggatgatgggaaggatgatgggaaggatgatgggaagggtgatggagaagggtgatgggaaggatgatggggaaggttgatgggaaggatgatgggaaggatgatggggaaggatgatgggaaggtgatggagaaggatgatgggaaaggtgatggtgaaagatgacaggatgggtgatgggaaggatgataatgagaaggataatgagaaggacaatggggaaagatgatggggaaggatgactggaaagacaatgggagagatggggaaggaggatgggaagaatgacagggaaggatgatgggaggatgactggagaggatttaacagaagagaggatggagaaggaagatgggaaggatgatggggaaggatgatggagaaggatgatggggaaggatgatgggaaggatgatggagaaggatgaagggaaggatgatggagaaggatgatggggaaagatgatgggaaggatgatgaggaaagatgatgggaaggatgatggggaaagatgatgggaaggatgatggggaaagatgatgggaaggatgatggagaaggatgggaaggatgatggagaaggatgatggggaaagatgatgggaaggatgatggggaaagatgatgggaaggatgatggggaaagatgatgggaaggatgatggagaaggatgggaaggatgatggagaaggatgatggggaaagatgatgggaaggatgatggggaaagatgatgggaaggatgatggggaaggatgattgagaaggatgatgggaaggatgggaaggatgatggagaaggatgacggagaaggatgatggggaaagataatgggaaggatgatggggaaagatgatgggaaggatgatggggaaggatgatggagaaggatgatgggagggatgatggagaaggatgatgggaaggatgatgggaaggatgatggggaaagatgatgggaaggatgatggggaaagatgatgggaaggatgatggagaaggatgatggggaaggttgatgggaaggatgatgggaaggataatgggaaagatgatggggaaggatgatggggaaggatgatgggaaggatgatggagaaggatgatggggaaggttgatgggaaggatgatgggaaggataatgggaaagatgatggggaaggatgatggggaaggatgatgggaaggatgatggagaaggatgatggggaaggttgatgggaaggatgatgggaaggataatgggaaagatgatggggaaggatgatggggaaggatgatgggaaggatgatgggaaggatgatggggaaggatgatggaggatgatggagaagggtgatggggaaggatgatgggaagaattatggagaaggacgatgggaaggatgatgggaaggatgatggggaaggatgatgggaaggatgatggggaaggttgatgggaaggttgatgggaaggatgatgggaaggatgatgggaaggataatggaggatgatggagaagggtgatggagaaggacgatgggaaggatgaatggagaaggacgatgggaaggatgaatagagaaggacgatgggaaggatgaatggagaaggatgatgggaaggatgaatggagaaggatgatgtgaaggatgaatggagaaggacgacaggaaggatgaatggagaaggacgatgggaaggatgatgggaaggacaatgggaaggatgatgggaaggatgaatggagaagtatgatgggaaggatgaatggagaaggacgatgggaaggatgaatggagaaggttgatgggaaggacgacgggaaggatgaatggaatgggtgattgggcaccaagtgagagcattcggtgacacctttttttttttttttgagactcccttttttttttttttttgagacggagtctcgctctgtcgcccagtctggagtgcagtggtgtgatctcggctcactgcaagctctgcctcccaggttcatgccattctcctgcctcagcttcccacgtagctgggattacaggcgcccgccaccacgcctggcaaattttttgtaattttagtagagagggggtttcaccgtgttagcca[134 bp omitted]ttcgcaatgttgtgcaactataact[224 bp omitted]tgaggcaggagaatggtgtgaacccgggagcggagcttgcagtgagccaagatcgtgccactgcactccagcctgggggacagagcgagactccgtctcaataaataaataaataaataaataaatagtcagtgtcttgctttttggcccaggctggagtacagtggcatattcacagctcactgcagcctccaattcctgggctcaagggatcctcctgcctcagcctctcacgttgctaggattgtaggtacaagccaccatgtgtagctccccaaaccattcttcttatctcagaaagaaatcctctggatttagctatatttgacatttcatgtaaatataagcagacaatatgcgtccttttggcctgagttttttcactgagtgtcatgtttcaaggccgtgctccattttttttgtgattgactactattccagcctacgaatatgccgcacggtggttcatctctctctgccgatggacatttgggctgtttctacgtttcgaatgatgtaaacgagctgtgtgtcttcttcaataaatgcccattgaagtcttttgcctattttttaatggggttgttggtcattttgttgctgagttgtatgcatagtttatgtgttctggatacttgatcctgatgagctcagtgaacatttataaacaaactgaccatagcagcccccactccaatgaaaacgccacctgtgacggcccccagaggcccctcgtccctcctggtccctgccccgggggccccatcctgacttccattgctggcagcgggtaggttcatgtcggctgctcttgaattcctcctgcctgggctgccccgcgtgatccactgagtgtggcagagacgtgtcgtgctgctgccttcagcagctccacctgcttgctgagaaggttcccggtgcgtttggaaggcagaggctcctgggcttgcaggtaggtgaacgcgctgacagagaggactcggccggcgcaccccctcacccccgtccaccatcctgaacacctagtcctcacacatcctggaagatttgcagcctcagtctcttccaaatgtgtcttactcctctctgctcaccctggtgccaggcatccgcctttgcccatccagacccagcaccagtgccctgccctccccttggcttctgtgctgcccggccatgccccttccttccagacagttcaggtcatcctaaaacgttcatccaagccctttgcccacaggataaagtccacactcctcttacagtcctgtgacccacaggcctccttggaattttggggctgagtcctttctgctctggggcttcacaacccttttgtcctctggcctcctcttccaggaagtcctccaagggcaagccttgcaggactcagactaggcacccaccccaatgcttgtcgatgagaaagcctcagtcaggaaggaactcgggcagaccagggatggtgcccctgctccatgacatctgggagtctgctctaagaccaggaggctggggcccacctgggctgccagctgcacctgcctccctgggccacctccttttcatggcctgggtttggaagctacccactgccactttgtattgcgcggagcagtctggaggggacaggcccagtggccactgctccatggggtgagtctcagctctggagagcgcagggccgggaacatcatgtcagggacaccctggagctgtggtatccccgacacgagcataaggcacagcagcactcagtccacatttgccaaaggaaaggggaacagccaacacgcatgacccctcaccgcgtgcagacgacgcgtgacccctcaccgcgtgcagacgacacgtgtgaccctcaccgcgtgcagacgacacgtgtgaccctcaccgcgtgcagacgacacgtgagaccctcaccgcgtgcagacgacacgtgagacccctcaccatgtgcagtcaccttgctaggcagcttatgtgccttctctcgtttcatcctcaggtttgggaaaattatccagaacttggaaaggggtaaaaacatcactgcctgctctttggatcctggaccctcggcacggtgggcctcagagctgatcattccctggggtggggccgtcctgggcactgctgggtgctgagcagtgtccctggcctccgcccactccacaccaggagctcccctagtcgtgacaaccacagaagccccagacgttgccccgtgtccccgaggggccgaatcacccagaggatcagttgtattccagagcctcgaccagcccggccacccgggggtcactttgtggacgcttccctccactcttgccagtgtcctggctctggggttggacgctgcttgggattgacaaatgcggatgagttttgtccctgagcggcaggtgcctccttcctcctgctgcgtataaaactcagtccagtcctgccgttccttagtaaacactcggacgcacctttgacctacagtggcccgtggtctgaatgaggtttatgcgtgagtgctttgaaagctcaatgttgccatcacctgaagcctagagggcagtgtgcactgggcacctcacttacacaggaggaaactgaggctcagagagggggaggggctggcagtgtgggagctgcagtccttgatctgagctgtccccgtgactttgggagatgaggaaggagcattctgtggcttggctgggggagcccaggtgggaggggagggtggggacacagtggctggtgggcgggggggtgcctctgagccgcctgggccacaggcaaaggggttagggaggtgagaggggagcttgggggcaagggtcatgtgtctccacggccgggcaggtgcacactcccagggaggccacgaggactctgtggcccggggattggagtgaaccacgctgaaaggtcagagggcagtgtcccaacaacagtgcccccgttccagccccaacggcagcccaggggttcccaggcccaccctcactcttgcaggggtccccaggcccaccctcactcttccagggttcccaggcccaccctcactcttccagggttcccaggcccactctcactcttccagggttcccaggcccaccctcactcttccaggggtccccaggcccaccctcactcttccaggggttcccaggcccaccctcactcttgcaggggttcccaggcccaccctcactcttccaggggtccccaggcccaccctcactcttccaggggtccccaggcccaccctcactcttccaggggtccccaggcccaccctcactcttccagggttcccaggcccaccctcactcttccagggttcccaggcccaccctcactcttccagggttcccaggcccaccctcactcttccagggttcccaggcccaccctcactcttccagggttcccaggcccaccctcactcttccagggttcccaggcccaccctcactcttccaggggtccccaggcccaccctcactcttccaggggttcccaggcccaccctcactcttgcaggggttcccaggcccaccctcactcttccaggggtccccaggcccaccctcactcttccaggggtccccaggcccaccctcactcttccaggggtccccaggcccaccctcactcttccagggttcccaggcccaccctcactcttccagggttcccaggcccaccctcactcttccaggggtccccaggcccaccctcactcttccaggggttcccaggcccaccctcactcttgcaggggttcccaggcccaccctcactcttccaggggtccccaggcccaccctcactcttccaggggtccccaggcccaccctcactcttccaggggtccccaggcccaccctcactcttccagggttcccaggcccaccctcactcttccagggttcccaggcccaccctcactcttccagggttcccaggcccaccctcactcttgcaggggttcccaggcccaccctcactcttgcaggggttcccaggcccaccctcactcttccagggttcccaggcccaccctcactcttccaggggtccccaggcccaccctcactcttccaggggtccccaggcccaccctcactcttccagcggttcccaggcccaccctcactcttccagggttcccaggcccaccctcactcttccagggttcccaggcccaccctcactcttccaggggtccccaggcccaccctcactcttccaggggttcccaggctcaccctcactcttccaggggttcccaggctcaccctcacgcttgatgatttgcgaggacgcacggaactcccagcaagctgtcctcgtcacaggtagggtttgtcacagtgccggggtgcaggtgccgtgggctggggaagagcacatgaggcagcgtcccggagaagccccgtggtcctgtccggggaagccgggaactgctcactcacagggcgcacggaccaccaggaaagggcacggcagcctaggcgcccagagctctgcgagggatccctcgtgggggcttgattgactgattgcttgccacggggttgccctcgaactccaagggtgtctgacgctgtgagacccaaggcgctcccaagtcccacggttggtcttgctggtgtgaccctccctaccccagaccaagacgctcccctcaggcagggcagaaatcacctcccaaagccaaggcaaagcccagacctcaccccgcacgagaggattcctcaccccacgggggaaggtgcgggtctcatccgtggcaccgcagcagggctcagccggtgaccaggactgggtgccacgggtgctgggtccgtgcccactccagccccaccagcaggcagggagggtacagggtgctgcagaggaaaccgagtcacagagaacggagggacttgtcaggattctgacccatggctggcagagcacagctccctggggccctctctgccagatggcaggggccggccatgcaagcaggtgtccagtcccacccaggaagggcagcgtgggtccagccctggtccgaattcctgtcctgtcagctgggaggtgtgcgcaggcccctttgccttctgtgcctcggtgtttccatctgtggatggcagtaggcagcgtcttgctgaggattcagcgggtcctcccgcccacccacccacgatgcgcttaatcaacaggccctgccctgcgtgtgaccctggagagaggctctgggaccacgtcactgtacagtagggtaaactgaggctcaggcgccggcccgcgggaatggcccgccctcgtgggaggagcatgtgtgcgggtcggcgtccgcctcctcctttttattgaagtcatttttctcctcctgtcagcggaactggccgtgggcagcccctccctcccacccccaggagctgagaagaaaacaaaagcttaatcgaatccggcactggggcggtgggtgccgcagagagaggccgagggagcccccgcctgggtgggtctgaggccgcctgtaattatggccctgatgtgattatattaattatcgtcgctattttgtgccggcttccgcccggcgagcctgtggattgagctctactgcacacaagccgccagggctcatcacagacagagccttcggcctcgggagcctgagacccagagaagccacgcactgccccgggccacaccccacgtggaaggtggggcttgaaactcaccctgcggctccccacacacgtcagggttagaggttcaaggccccagagaggacaggccgcaaggcaggggccctgggaaggtgttactcctcctcctcggatgggagagacccactg[216 bp omitted]ggggcaggagaatcgcttgaaccctggaagaagaggctacagtgagccgagactgcacctctgtactccagcctgggcgacacagcaagactccgtctccaaaaaacaaacaaacaaaacaaaacaaaaaaactgaaacaagccggcttgagcaaacaaggcactttaccggcccaccctctgagctgaaatggtgcgcagttatggacttcaggcatagctggatccaggtgtccgcaatgtctccaggcttctgactcttcatctgttgttccctatgatggctcccctctgaagaaggggcatctttttgtaatttgcaccaaacggggtgccccccgcttgtggtgcccatggccttcctgagggtcgggagactcaggatggccgccagtctgaaaggagagactgctggcaggtgtgcctgcctccttcaccgcacagcacccactggggccgagcgctctgtggcgccagggatgctggaggtgcaaacagtagattcgttctgctcaggatcaacatcacaaggcagcaaacggccacagccaggagggaacaagggcatctgactcccccggggtgggggctgacctgaagggcagtgggccaagacctgaggcagggcgagacaccacgcaggcgcagaatccctggatgacgcccacttggaagtggaggggggagggcatgggcagctgcagctcccagacaccagcacacacaaacgcacacacaagtgcacaccagcagcgacacaggcacacacaagcgcacacagggtcacacatgcatacacggctcacgtgcttacacgtgcacacgccagcacacaggcagctatactcgagtgcctgcaggcgctcacctggcactgtcacatacgcccaacagatgagcacggtaacggcacacgcagtcacactgcacacacatgcggaagcacatggcgacgtgtgtgcacctacctggcacgcacacgcacacacccgtgcagcctagcgatgagtggctggggctgaagaggctacaaggcgcccgtagccctgtcaacccgtcccaggccctgactggggctcaccaggccgcggtcaggaggccgggctacgctgaaccccaattcccaaaagctcctggtggatttgagatggcagagacatctggaccccatgggcagcaggagagacagagcagcccagcctgggctgagagcacagggacgggtcctgccccgaggggtgtgagggggggacggggtcctgccctgaggggtgtgggggggacggggtcctgccctgaggggtgtgggggggacggggtcctgccccgaggggtctgagggggggacggggtcctgccctgaggggtgtgggggggacggggtcctgccctgaggggtgtgggggggacggggtcctgccctgaggggtgtgggggggggacggggtcctgccctgaggggtgtgggggggacggggtcctgccctgaggggtgtgggggggacgggtcctgtcctgaggggtctgagggggggacggggtcctgccctgagggggtgtgggggggacggggtcctgccctgaggggtgtgggggggggacggggtcctgccctgaggggtctgagggggggacggggtcctgccctgaggggtgtgggggggacggggtcctgccctgaggggtgtgggggggggacggggtcctgccctgaggggtgtggggggggcacggggtcctgccctgaggggtgtgggggggacggggtcctgccctgaggggtgtgggggggacggggtcctgccctgaggggtgtgggggggacggggtcctgccctgaggggtctgagggggagacgggtcctgccctgaggggtgtggaggggggatggggtcctgccctgaggggtctgagggggggacgggtcctgccccgaggggtgtggaggggggaacggggtcctgccctgaggggtgtggggggaacggggtcctgccctgaggggtgtggaggggggatggggtcctgccctgaggggtgtggaggggggacggggtcctgccctgaggggtgtgagggggggacggggtcctgccctgaggggtgtgagggggggacggggtcctgtcccgaggggtgtgggggggggacggggtcctgccctgaggggtgtggggggaacggggtcctgccctgaggggtgtggggggaacggggtcctgccctgaggggtgtggaggggggatggggtcctgccctgaggggtgtgaggggaacggggtcctgccctgaggggtgtggggggaacggggtcctgccctgaggggtgtgagggggatacggggctgtgtctagagggggtctgtggagacagggtcctgtctgaaggttctgaggggaggcgggacccaccctgtagggaccgtgtggggtccgagtcctgtttcctgacatccatgtagtcaagagctggaaccgtgaagcagaacccagacctgccgctccaagggaggtggtttatcaggggctgggctcctgcccccgcctgcctccacccggggcaggagaatgcggagggcagtggaaaggaccttgccaatctggaatcctcttctccttcctccctggagttcaccgcagaactctctcgttattaaacagccagggaagccaacctccacccccgtattcccgaaacacctttattgcactataaacagcatttataaacaaacacagctggggagtgtcttaaagatttacccacagtcaacctcagacactaagatatcaaagagtgcaggggggctactaaacgggggaccccagggagaacagggcctgggaggggtgagcatcagagaaggcggggagcgccggcgtctctctccatgcagggcaccctccccgcctccccggcctgaggagcctccgccctgggtgccctggcttccgggagagagcggagccctgcaacaccaggctcagaaggggcctgcactctccctctggagggctcacaggtgtgtcccaccggacgtgcagcaggggcccagctgctcctccagtcctgggaagcagctcctccaccctcccctggacaagaggaacaatgtgtggcaaacgggctgacaagggacgtccctgggtaccacagatgtgccctggttcctccgtgcccaccagcagccgggagaggcgaaggcactggcctggcctggcccctgctttgagtcttatcatttctgcatcattctgagctggaaacctccccaaaatcattcaaggacccacataaccacacaatggaagccttgcagccacctaacagcaggaaaggccatagccaggtccccccagctgcctcctgggctccgacccacccaccgtagccacagcctatttacacacgtggcgtcaaagccacggccgtcaatcactgcgtgtcgctcccagctgcagacgctggacaaaagggcgacggggtggcagcccccagcgaggacggatgggccatagggctgctctctgggcatctctgagcaagaccctccggcgccacagcagaaatggccagacgggcctgtacccaaaaagccagcggcgacagtgttggaggaaaacaggccaggagagccgtctcctccccgcggacctctgccaagacctcctctgctccgactgtggcagcggctgctccctccgcgcccaccctcgtcagggcaccctcgcctggccccactccccaccggagcctgggaagctggggtctcccagagccaagcctgacccctgggagggggcgtcccgggcagagcctgggcctggtgtggccgcgaggccctgctctccgcggggtgggaactggatggcggcaggctgtgggggaggaagacacacgtgcagtgaaggagactgtgggctccaagacttgtcacctccctgtccacggccccgccctggccacatgcacggattcctgaacccctgagaacctccttctagaactctgcgtgaaaggcgcgaggcagtgtggaggggcaaagggggaccctctgccccgcgaagtggccccttctcttcccccgaggcccctctcctcctcctcctcctcctccaaaggagaaattaattcatgaaaaataatactccagtcagcatcgggtgacccaggaaaccctgcgtcagctacagcatcagcgcccagcccagcctgagtgtgagcccctccccggccagccccagcccaagccagcggacccgcccgccagcacccggtgtggaggagagaccggggtctgccctctgcacccgagcggacagcgagcaggtccccgctctacaggaaggggagcagggaggtcaggggcagctccttctccccgagcagcgtgtcccgcttgaggctgctgcccttgttcaccaccttgatcctgagggccagtttccggacgctggcgggccccaggccgtcgaagaagaaatcctcgttgaagacggggcggcggctgttcttcacgatggtgctgcgctgcttctgcagcttgcccggcaccaggcacaggcccacgcagcagttgatgctgcgggcgtcgcacaggcggtcgtagaggccctcggcggccagcaggtgcacccgcaggcgggcctggccggcctcgtactcggccagcagccgcacgctgccccgagggcccacgtggaccgtgtgctccccacgcgcctggcccgactcggggccaggttccgggggtgcccggcgggtcaggcggcgccggctcccggggctggcgtccggggtgctgtcgtccgcagacagggagccgtggcggcccacggagtgccggagctggctcaccttggcctggctgtcctgggcgaaacctttgagcagagacacggagcgggacagcagaggggacccgaagggggaggactcggccgaggaccctgtgtcgctctccccgccactgaagtagcggccggggctcatgagggccccgccagcctccctggggcccccatcacccccgttggccttggcagctgcccggcggcgcccggcccctggggagcccacctgggccagagccccgtgctcactgtggaacagagactccttgcgcctcgtgtgggggctctcagccagcatggcgaagccgtaggacgtctgggccttgggcaccgagggcagggacatggcaccctgggcctgggggtcggcgtcagtggcctcctcggacagccagtcctcggcactctcgatctggatcacgtgccgggtggctgccttcagcaggctcttgctctcggctgccagcttggcaggcagccgggggctccgtggggtctggcggggggccgcagaggccaggttctgttccgacgtggaggggcccagcgcggcctgtccctcgccctccgcggggcccgagggcagcttgggggggatgaaaaagtcggggatcttgtcgggcgtcaacacattgctgtacaggggccccttggaggccttgtcccccgcctcactccccacgccccgggcagcaccgttttccccagacccccgaagccgctccaagaaccacatgttggtttttctcatgggggcggcaggcaagaggcccggacaggggctgcagcgtctgggaagagaagcaggggtcaggagcagtggggggcggctggcagagggccctgggcacctgctccctgtggggcctcccggcagggccctgccggcggggtgggggtggaggggtcccctgggggcgtcccgcccaggcgcggcggcccaggacaggagtgaggcgggttccccccacctttttccggagagatcccgcttaacttcccagcaccaagcccaggggcgtgggggccgcgctctgactctccggggagctcccagaggagactggcccctcgcccgcccccactctggttttgagcatctcagcgctcattccaaagggttccgcgctcagtcccaggggaagacacggatgtgggtggacccccggggtgtcccagctccgcccccccggctcccacccacctgtggctcctccctggaccggagggccaggcgttcggggtgggggaagggaggggcggtaggtctggggccgagagagcagcgagtcgactccccggtgtccccccgcccccagccctccccgactccgcttggggtggggggtggggtcccggcggtccccgcagaccgggcggggtccccggacttacctgcccggggtgatggcccgaggccggaggtctgttcgcagacacgcaggggtctcggcgcgcaggctcccggggctggcgcgggggacgcggccggagcttcgatgcgggcggcggcggcggcggcagcgcagtcggactcattcacccgcggcgggaaaccgcccagccccgccgccgccgccgccgtattcctccgagtacggccgcccgcgcccgcgcccgcgcccccgcccccgcgggaagggggtggggccgtctccccgcagcccccggaggctggtggcagggaggagcctcgccagggcccgggggctgactgggggccggtgggagacaagcaggtggtcacggttggctgacggccacccccggcgctcacgcccgcagattccgggaagtcggactcccaagcccctgcctccgtataccggaagagggtcccagaccccctactcgctgccggcgaggagctttcccgactaacgacgacgaattaaatgacggcaacagtaataaatgcagctgggtttatgatggagcgtttcctccctgccagcctcccagcgtcctggcgggtctctgactctcacacaacccagtacgcaggtcctactgcaattctcaatctgtagatgaggaaggtggggggtttccttccagaaacaaggaccgaacagctaggacagcaggtcttactaaatgggcaacctctcagcagccctacaagaagcctggaaggggggggctccttcatttcatggacaaacgtttcctgagcacccgcttgatgctggacagtgacctggccaccggggacacagctgggacggagggaggtggccccagccctggtgatgcaggggcaggatgcccacagagcgtacaggtgcagcttagaactgcaggggtggtgacgcccggaacaggaatacagcaggaaagcgtgagggtcggggcgaagagagaaggcacatgcgtgtgattcacggatggagaaacccatagggggcaagaccaggtccaaacccaggcttcctggcagttcctgagaccacagggtccccccctcctgaggccccgacccccctcctgccagctgcttcgtgatctgccagccccggccttcactgcttccttctctccctccctccctgccctccccgcctcagtttcctcttctggaaccgagctgagcagttcccagcctcctcgtgcttggagccagcaagataacatatccccaggaccaacccggagccggcggacgcctggcgctttattgaattattgattgtccaggagcctcctgcattctgggaatgtccccaagtctggatgtggcccaagctgggaggagcggctgctgccacagtggtagaagaggggtccaggagggcgagagagctgggctgaggcctccccactctccacgtacccttgcaataaggggttagagtcctgccgtccagaggggaaagtgaaacccggaggagctgtgaccccatctaagctttgctcacccagcaaacgttgatgagccctcatttttgtgctggggcaaccgcgacgcagccccgaagtctgacaaggaggcagacaccgaggaattctccccttcaccgccgccgcctccaggaagcctgggcaggccccaccacagactagcagggcccccgaaccccagctccagctgccatgcagaatacccttgggctgctgtccaccacccctgctgggcctgaggcgggaggagggtcctgggggtctgtccactgcccctgctgggcccggatcctggggatctgtccaccgcccctgctgggcacggatcctgggggtctgtccaccgtcactgctgggcccggatcctgggggtctgtccaccgcccctgctgggcccggatcctgggggtctgtccaccgcccctgctgggcccggatcctgggggtctgtccaccgcccctgctgggcccggatcctgggggtctgtccaccgcccctgctgggcccggatcctgggggtctgtccaccgcccctgctgggcccggatcctgggggtctgtccaccgcccctgctgggcacggatcctgggggtctgtccaccgcccctgctgggcccggatcctgggggtctgtccaccgcccctgctgggcccggatcctgggggtctgtccaccgcccctgctgggcccggatcctgggggtctgtccaccgtctctgctgggcccggatcctgggggtctgtccaccgcccctgctgggcccggatcctgggggtctgtccaccgtctctgctgggcccggatcctgggggtctgtccaccgtctctgctgggcccgagccgggaggagggtcctggaggtcctgtccctgtagtggccccaaggcacaggccagccatgtctccagtaaacatttgccaaacaaatgggtgaatagcatcgccacgatggccccgaaacagtgctctttcagcaggcccgaggagagggggcctcaggggccacagagccaccctcctccattgcagacaaggacagcagggcctggggagggaagcggacagcttgggtcctaggaaggggcagtgacgggtctcctgacatcaggccagccccaggtattgggggttcgctctccggcacccctgcccagcccaggtgggggcagagcctctcctgccagctgggttgggggatgaggcactgagtttacactatgcctgtctccatgctaggacacaaatccagagctggtcaatcagggcttgaatcctggtgccaacccttcccactgtgtgacgctggacaagcatccagacctctgtctcttcagcagcccagggcaccacggctctcgagggagggctcaacagatcactatgtgcaaagtgcctacagcaccccaccatgtgtgcgaggcaggcgtcagtcgccctctccctcagacgcttctgcaggtcaggaagggtctcaaccaggggggagctggcccagacctcaaagtgcaccccagagccctgaccccaccacagcctggcttggccagaagccccaccccatccccacatcctatcacatttgggggctggggaaacataggcctgaaaagtacctgggatgggtcctaacacctgccctgtggacggacgcagaccccaccctgggtggggcaggggcagggagcccggggccttctggctgcttagctctgcaccatcggtaagtaaacaggagcctctcctggtcaacagaaccttctgcttccctctgcagcagcctcgctgcagccctccaggatgggagaccaggatgctgcagattcgggctcaagctggaggaggggcccaggtggtatcgaccagcccctctccgccctgagtcgtggcgcctcatgctgggaggctttggccctccatccccccaggtgggggccccaccagggacccggggcttcccagagccaggcctgaatccaaggctgccccacagtggcctccaggataacaggcttggaggacctacagggaggtggtttaaaaaggggagggctgcaatccgagctccaatgctgaggaggccactgggtagctgtgcagcttgaagacttaccctgggagcctcaggaaagggaggggacggcgtaacaataaaacaatcccaggagcaggactgtctgcgagctcccaggagggacctgactgattcgtgcatcacgggttagcccagtgggagggccctggagggccaccatcgccagtttccagagagggacactgaggcaccggggagtagcccgattcctcagggagcacatggaaccggctgacctccaggcctgccgcaggcggggtgctcagttgatactagctgattcccggggcatcctgcccctccacggcaccagctgatacccaggtcatcctggccatctatggcaccagctgatacccggggtgtcctggcccttccatggcaccagctgatacccaggacatcctggccatctatgccaccagctgatacccggggcatcctggtcatctatgccaccagctgatacctggggcatcctggccctctatggcaccagctgattcccggggcgtcctggcccctccacggcaccagccgattcccggggcgtcctggtccctccacggcaccagctgattcccggggatcctggccctctatggcaccagctgattcccggggcatcctggcccctccacggcaccagctgattcccggggatcctggccctctatggcaccggctgattcccggggcatcctggcccctccacggcaccagctgattcccggggatcctggccctctatggcaccggctgattcccggggcatcctggcccctccacggcaccagctgattcccggggcatcctggcccctccatggcactagctgattcctggggcatcctggcccctccacagcaagtcctcctgtctcctcgtgcaggggatcgagtgcgattcagggaagaaaacgactcttccaggctgcgcagcatttagaggttgaatgtgacccagggttctcctgcctcccactccaggctcaggctcccgaggagtggattattgacttaattattccaattattggaagtacaaaggtaggaaaggggaggagacaggtgtagggaccgagctggagccaggcgtctggggacccaggctcttccaacccagagaacgggattgggagatgggggccctccaaaaccagcttcaccacctcccagtgggatggtctcgggggtcacctcgcctctccgagcctccgtttcctcatctgtaaagcagggagagtttcagccccccgagttcatgatactcttggctcatgtcccagcaggcgccagtttctatttacacagggacttggaagaggacagacagaggtggagtgtggatgggcaacttgggcccagggcccagggctatgaatgaatgaatgaagtgcatttagacccctctatcctatgcatcttgggaatctgacactccctactccccagcactcctctggtccagcgcctcctccttgccctccccgcaattcccaacagtttacttcccacagggaatgttatcacccctgtgctcaagacccctggcagctcttcctggcaccaggcctcccccaagctctgtgtcctcaccccgcttctgacctcacctcggccacactggccacccttctgctccctgaacgtgctggctgaacacaccacagggcctttgcacacgccatctcctctgcccacgccatctcctctgcccagagctctactttcttcacctggatttcctgggatttctaagctccatgacgcactcttttccacagttgtttgttttgagatggagtctcgctctgtcctccaagctggagtgcagtggtgcgatctcagctcactgtaacctccgcctcccgggttcaagcgattttcctgcctcagcctcccgagtagctgggactataggcgtgcaccaccacgcccagctaatttttgtatttccagcagacatggggttttgacatg[139 bp omitted]gtcacttggccattaactccacaagggcagatctgttttggtcattactgcatcttgtttgcccaccagagctcctgacagataaaagatactcaagcaggtaaaagatactcaatgcaagcatgctgaaagacggtgggtgggtggatggatggagcagtgaagggaatgaaaatgaacaggcgatggatgagcgatagacaggtggatgcatggatgatgaatggatggacagatggaaaatggatagatggaataatgatggaggcttaggccgatggatgggggaccaggtgggtgaatggatagatggatggctgggttactgatgggtgtagatggggcgatgaatgggtgactggatggatggatgactgaaggatgtgtacatgtggagatggatggatggctggatatgcagatggatggttggatggatgagtgggttactgatggatgtgtagatgggggatgggtaggtggattacttgatgtgtaaatgggatggatgtatggttggatgtgtagatggatggatgggtggattactgatggatgtgtagataggggatggatgagtaggttactgatggatttatagatggatgatgcatgatggatggatggatgatggatggatggttactgatagatttatagatggatgatgtatgatgggtggatggatggatgagtgggttactgatggatgtgtagatgggggatggatgaatgggttactgatggatttatagatggatgatgtatgatggatggatgggtgaatggatgatggatggatggatgatgtatgatggatggatgggtgaatggatgatggatggatgggtgaatggatgatggatgggtgggtgaatgggttactgataggtttatagatggatgatggatgatgggtgaatgggttactgacagacatgtagacgggaggatggatgggtggctctgcctccacatctcggaaataaaagacgtgtcattgaagccccttttgggtttgcctttggaaggctccagtcctagttaaggacaaaccagagtggctttttctccccacacacacccttactagacctgtcccccagggcagggggtagggcctgctgtctgcagagaaagcagccagagatcctcggcccttgacagacatggccctgcagggatgtggagaggctgggaacctctctcctgggaagatgctgtgtttgtgggaacctctctcctgggaagatgctgtgtttgtgggaacctctctcctgggaagatgctgtgtttgtgggaggagctggggggtctcttggagccagaagctcagatgtaacatgacggcaggtctaaggaatggagctggggtgcttgagcacgatgctgggcgtcggggaagagcaggggcatcgagggggatgtcctggagagaagctaggacaacaggaaagcccggcccatctagggccatgctgggggcatcttggagaagaaaacaaccagctcttgtctgatgtcctgggctgtcttgaaaggcagaggtttggcattcgggtgataaactagggtgtctccaaggaggtgagagaagtgtttagtggagaagttgaactgtgttttatcctggataaaacagaggtaaccagagagatgcgggggctgctgggcagaggggtcaccccacaatctgccaggttcgggcacacgcacagccccgccttccttctctccaagtccaggcccttagggaggccaaatgtggtccctctgagccccctcatcagctctccacctgggagactcgtcccagccccagccccgcgagggcccccagatatgcaggtgggcttgtgctcttgtggccattcccaggtttaattacaaaccgatccgaacatcccatctgggtcgacagctgggagggcaggactggggggaagctgctgggcgcagcccaggccaggcaaccacgtccttcccctgctcccaggtggagtaggggcctcacgactgcctcgatatccactgtcttggagcagcctggctaccccgagatcccaggtgacctcaaggctgcctgcacttcagcgccagcatgtatcctggcctgagaaccccaaagcaccttaagcgtcccccctcaaagacaactgtgcacccagtcctcaggtgggaagaggaagcccagccaggcccggaatccgcctcctccccagggtcctgggagccctgactctccggggcgttagaccgaaccagccaggcgagagggggacccaagggccagggctccgaggcagcggctgcttctggatatattttctttaaaggcgaaatggttccgtctttggtatgaacaccctcactccaggcaaaggagggggtgggcaggggccccggcaggaggaggctctgcccagcccggggccagctggaggaaggaccatgccagaggctcatgcggaggaaggagaggcagcggtggttcggcctgaccaggatccaggaggagggctgagagccccaaggccatgacaggcaggagccggggctgagaacaggcaggagccagggctgagaacggtcacctgcgggcagaaagagaaggcgaggtcagggctgagacggtggccgcagacctgggctccggtgtgagccacatgctcttctgccttggcatcatctctgcaagtgccacacctcaggtccagcccagagctcctcaggtcgcatggctggggctccggtgcaggtgtcctgagtccttgctgtggacctagggcagtgccctaacctctctgctgtctcctcgcgtgcaagcaagaatgccgatcccagtgcctgtctcagaaccgaagggttgagcacattcctgggacagggcaacggcctcctgagcaggaatcattactgccttccaggttatttctggggtcaccaacgcctttccgaggggacgcaggcagggaccggtgcgaacggaacacaggagcccgtgtgccacaggccgcaggcagtttcaggtgctttacaggagcccctgccatacccggagccccctctgcctgcagcccgaggcctggctgggggctgggtggaggccgcggccgcataggggaggggccgcccaggagagaggaggctggaaggagaccgttgtcatggggacaggagagcggcctgacctggcccagaagcgcagcccttgggaaattccacagccccctccccctgccggccctccctcctccccggctgctctctcagccttcactccctccagccccacagctgcaccctctcctgccccaacctcaccccagaggagagaccatgagatcacccagacctgcctgtccctcctccgtccacaccctaccatgggtccccccgggccccgcaccaaaagtggaggcctggggctccttggcccggcctgaggtatggtcttctcactgcctgggctcacacgccagcccctgcctgtcccagcccaccgtcctctccggcagtgcccacccctcctctgggaaggaggcctggacacccagcacgccgcaggggtccacaaagaccaggtgacgcccaccacagccgaccgcagtgtcacggtcatggctgcacgctgccaccctcgggcacatatccacccacgggcagtgacgcgtgtccacacacaacctgcacacaaaggctcacggcggccaaaaggcggaagcagccccagcgtccatcagcggatgaacacacaaaacgtggtcccctcacacagcgggacattatccagccgagaacaggagccaggctctggcccgggccacggcgcaatgcccctggaggacgtcacgctcagtgagagacgccagacacagaaggacacacagcgtggaatcccattgctatgaaatgtccaggacaggcccatccacagagacaggaggcggatgtgtggggttggagctggggaggggacagggagtgacggctggtggggacagggcttctttcggggctgacagaatgttctggaattcgacagagatggttgcacggctcggatgctgaacacccctgagtcgtgccctctagagggaaaggcacggcacgtgaaccgggtctcaattttcaaatcagaaaagaatctggcaaaggaggcaaggccagcgacccacggcggcagccacacacctggctcagggctcccgtgagaccacgccacgcaggtgcagctcactctcggcggccacgatgggctgcccgttctgcaggtggtggtcgatcaggtggctgatgctctcaaacagcacgtccttcgtccgtacctgcgggacagagacctcggcatcagctcccgggagcccgcctggacccgtggagtaggatattggcgttctggggtcctgccggggagcccctagggtgcctgcatggacgaggggccggaccagggaattccgggacaccagccaaaggatcggcctcagaattccagaaccacccatgggcacgggctctgaaacccccagggttctggggccacgcttcctgtcgggagctgaaaggtgaccgcgggaagatgcggccaggtcccagccctcagagcctgtgaacgtgacctcatttggaaaaaggtcttggtagataaacaggtcaagggtcctgggacgaatgcatccaggatgagccaggggggccctaagtccactagctgctttcctgacaggaaaaggaaaacatgcagatgggcaggagagagcagagattggagccgtgtgtccacgaggctggcagcacccgggagcccggccaccagcgggcgccgggaggggcctgggaccgaggctccctcagagcctccggaaggaaccagccccggccacaccttgagttcggacttctggcctccagagctgtgagaatgaacctctgctgctttaagccacttcgtgtgtggtcatttggtttgcagctccaggaaacacacccctgaaatcctggagacacaggcctgaaaatctgaatcgccaaatcaaaatccagctgcatttttgaacgagaccctcttagcgctaccgagcgctggaactggatgcaaaaccaagagaccctgtgtcccacggctgccgagcagctcctgagtgaggctgggggccctgtgcacatttcacgtgggaagcaggggtaaatccacggctgccgagcagttcccgggtgaggctgggggccctgtgcacacttcacgtgcggaacagggacaaatacacattcctaggcctgtggcacaatcacgtccttctgtgtggcactgggaatgggagctgggaatctgccttttaacaaggtactggtagacgttctgaagcttctccaggtgtagtggctgccggtctgaccccagcgatccatttaacagagaaaatctggcctgggaaagaactgaggtatcacacaccaggctagaggctaggcagtggcggggacaccagaaacagtctgagggggctcaggaactgggagaacaggcagctctcgcccaagccctgccccctccagctctgtcccaggccggggtgcacaagagcccccacctgcccgcccgccgccgtgtgcttcacgcagagaccaggctcacaccagcccaagagccacctgaggattcagctggatggctgaaaacgcctcctacgctctgagaggcctccgaaccctctagcacctcctcacctgggaaataacctgtgcagccctcggacgctcaaaacgcttcataaaccctagaactccttgtaaattggaaaatgctttgtaaacctttaaatgctttagaagctggagattactaaatctcattggcccagagcaactgtaagatgcgccatgattttaggtaccaggaggagagagaagagaaaaacctccctgtaaaataatgatgcacttcaaatatgcaattgatggtttttaaacaaaatccagactctagagatatcaaa[139 bp omitted]tggtgataccccgtctctactaaaaatacaaaaattagtcaggcgtggtggtgggcgcctgtagtctcagctactcgggaggctgaggcaggagaatcgcttgaacccgggaagtggaggttacagtgagctgagattgcgccactgcactccagcctgggtgacagagcgagactccatcaagaaagaaagaaaggaaaggaagaaaaga[161 bp omitted]aaatatgaaaaattagccgggcgtggtggtgggaacctgtaatcctaggtactggggaagctgaggcgggagaatcgcttgaacgcgggaggcggagcttgcagtgagccgagattgcgccattgcattccagccggggcaacagtgcgagactccatcaaaaaaaaaaaaaaaaaaagaaaagaaaagaaaaagagagaaaaaaaggaaaggagggagggagagagggaggaagaaggaattgaagcaattcagtaacttgatcccaaaattccttgtaaattgagacatactttgtacaccctcaaataaattagaacctgaaaataccatatttatccctcagatacatcaccatttgtaaggtgcataagtcatgataaatggggggggagagcatcttatgatggatgaaatcataagattgagattacaactgggaggccaaggcaggaggatcacttgaggccaggagctggggaccagcctgggcaacgtggcaaggccccatctctacaaaacttagctggggacggtggctcacacctgtagtcccagctactcaggaggctgagacaggaggaccacttgagcccaggagttcgaggctgcagagagctacgactgtgccactgcagtccagcccgggtgacagagccagactctgtctcaaaaataaactggaaaatactttgtaattctacagtagctggtcaaaggcaacatctggaacaatctggaaaaacttcataaacatggaaagctcctgcatgccccgagaccctcgagacccttgagaccctcccacctgtgcccagcgaagcccctggatgccccgagaccctcccacctgtgcccagcgaagcccctggatgccccgagaccctcccacctgtgcacagcttaccacgccctcggggtccacgagcagcaggtgcttgggctgcccggcgtgcatgccggtgaggacatactgcccggggttggtgacgctgtctcgcacaaggaagtccccgtcagctcgaagcatcctctctgccgcccggcggctcatccggccgtggtaccagggctcctgacgcagctgttcctccgtgggggccacaggggcccggcgggtaggggggctgggccactggtcctccaagggaagaggggctgctgtcacgcctgccgccactgagcactcatgcaacttcagggcatcctcaaagggtcctgcaggccagggacaggagtgctgggcaggcagggggcaagcagctactcctgccgggaccagagctgggagaaacgggttccccggggagtccctcgtgcacccgtcggcctgcgctgaccgagcgcccacagcgtatcagactcgcactctgcccagccccgtgcgtgcggtgggctcacatgtgtagcaacctggactccccaggttgggttttctaggcacgtactaagcatgtacaaagggtaacagcagctctttctttcagaggttaactcctatttctttttcctgccttgtcaggtgggcttccttcccaaagcgtacgcctctcgtttccttgtctggtcttactgcattggccgcggggcctccaatgtgccctaaatactcaagacgacagccggcacccctctcttgcccctagcgttaaaatgttctgccctgggttttctaacggcttccaacaatgccaacatccgacaggccactctaaggctctcctctgagtgtcagtcccctcattgtcaaacaggggtgggcgtgtccccaggcagaaagcagcatggttcagaccctgcagtgctggagccccagccctgacggagatgcatctacccgtggctggggcggccttgaattcctccagctcctggtcctggggggtcctcccgccctgaccctcactccctggtctcccgcccctccagctcctggtcctggggggtcctcccgccctgaccctcactccctggtctcccgcccctccagctcctggtcctggggggtcctcccgccctgaccctcactccctggtctccggcccctccagctcctggtcctggggggtcctcccgccctgaccctcactccctggtctcccgcccctccagctcctggtcctggggggtcctcccgccctgaccctcactccctggtctcccgcccctccagctcctggtcctggggggtcctcccgccctgaccctcactccctggtctcccgcccctccagctcctggtcctggggggtcctcccgccctgaccctcgctccctggtctcccgcccctccagctcctggtcctggggggtcctccccccctgaccctcactccctggtctcccgcccctccagctcctggtcctggggggtcctcccgccctgaccctcgctccctggtctcccgcccctccagctcctggtcctggggggtcctccagccctgaccctgggggctgagccagctccaactcctagcctggccagtcagcatgttcacctccccctcccagccagcgactggtttggggacgagcacgtggcgaatcagaggcagccccaggactcttcgtggaggacggacgagaagacacccttcctcaaccggggctgcctggcagtctggtcaccctgagggacagcctgcctcagagggaagctcagagccccaagcccctcctttcccatctgagggctgctgtgaggagccaagaggagcaagctcttcacgtagtgcttggtacacagcaggcgcccactaggtgctagatggtgtcattattgtgaagctgaggagaagctgctttgtcaggtggtggaggaaagggagaaatttgcagttagcttgggaggcatcctgagctcaggcaaggaccctacccggcagctcagagccaacacctctccgtgctggagaagggcagagtcgaggctgcaggaaatcaggagagaactctggacacctcagccaaggaaggacaagcctcctccgcccggctgggggctccctcgggctgggtcatccacggggaaggaaggaacgggctcaccgtcagactagccactttgtccagaggtggactaagcctccctcattggactgggcgttccttcaagcaggaagctgtgcctcccccatcaggccgggatttccgtaggaagaatcctcagaccccggagtcacgtgaagagaaaactcatcagactagggagacccagagtcagcgtgcaagaccagcgggccaggcagtcgtcccagcaggccgggattcccacagagaaaagacgaggcctcccctctcagactaaggagtcccatggggcgagggtctggcttcccctgttgactggagggcctcacagacggggccgcagcctcccaccacactgaccattctttcaaggaatgacgaacctcctcccttcagaccgggggttccgacagaggcaggtgggttacccccgagagagtggagcttctcacagagcgggggccagcggcattcccaaccagactgggggttcagcagggaggccccgggagatggggtcctgtaggaggggctgggcctcacccattacactgctcggccgcattcgctagagagaatgggcctcccctgtcagactggccccttttaaggcagagtccaggacacccccatcagacaaggcctccgacaggagacagactgggcttccccgtcccacccgtcgacttgaaggatctcacggggagaagggagcctcccccatcagaccagggaatcccgtagggagtgggggtggggttgtgcctcccccatcagacaacacggccacacgcgatgacggccgccccccaggctgccacatacgcatgtcaaacagatcctttttggggctgtcctccggctcgggggcgtccagaccctgggtgttgacatacaggtgctcctcgtggtccggggggccccgggcgtccgcctgcacgtagccgtcccccggtggagctggggagtgtaaagaggggcagggggtcagctgggagccaggcgaggggctcgcagggagcaaggcggggtcccacgaggagctcccccggccaccacctgtgctgctggctgcagggcggatgctgctctggtctccctgtggtaacccgcccgtctgcaggtgccacagggagcatcttacagcagcaaagccccgtcggggctccaaccagggacaagagtggggcagcgtgcggctggggctgtgggcaccagacgtccacgcccagggagaaggcagccgctgctccaccccaccccgccctggccctccccggcccagggtccagagcttcccagtgcgtgtatgttcagtctccacatttaaaaataatcacagtaactctgcttccctgtaattatgctatcaacatgacgcacggagggtcacttattctgactcagttctatttcaggattttccttcctttct[142 bp omitted]tgaaaccccgtctctactaaaaatgcaaaaattagctaggcgtggtggtgggcgcctgcaatcccagctatttgggaggctgaggcatgagaatcacttgaattcaggacgcacagattgcagtgagctgagattgtgccattgcagtccagcctgggcaacagaatgagactcagtctccaaaaaaaaaaaaaaaaaactatccacatggttcaaaccggaacagcatcgcaggtaaccttggggcatctccctcgggagctgcctggaccccatgtgtattctgccaggtcctgaccagactgcctctgccttggaacagggtctggctgtgaatccacatgaacgtgaggctgcactagcccttgctgggtgacgagggcagaggggcttctcccccgccttcccagtctaccaagaggggcacagattctctcagcttcttagggtcaggatgggtgagagggaagaaacgcagttccaagagtccggggagggaggacgacagtgcgagaggcagagtccggggagggaggacgacaccgagaggggcagagtccggggagggaggacgacaccgagaggggcagagtccggggagggaggacgacaccgagagaggcagagtccggggagggaggacgacagcacgagaggcagagtccggggagggaggacgacaccgagagaggcagagtccggggagggaggacgacaccgagaggggcagagtccggggagggaggacgacaccgagaggggcagagtccggggagggaggacgacaccgagaggggcagagtccggggagggaggacgacaccgagaggggcagagtccggggagggaggacgacaccgagaggggcagagtccggggagggaggacgacaccgagaggggcagagtccggggagggaggacgacaccgagaggggcagagtccggggagggaggacgacaccgagaggggcagagtccggggagggaggacgacagtgcgaggggcagagtccggggagggaggacgacagtgcgagacgcaggcgggtggaggaatccctggaccctggacccgcgctatgggcacatttgtaggagttcttggccagagaatcgggaagggcatgagtgcaagtgagaacagcccgggtgtgggcacaggggcagggaacgctggcgagcccccggtccggggtgagcagccagcatcccagaggaacgtgcgccaggaccagagcacagctgggcaccgggtgggcactcgatggctcgagtttctctgaccagctcgagggctctgacgcttggcagcgaaatgccagattgtttgggaagatctaaaaaaagctcaacacagatgttagcaaggctgttaggaaacaggcagccgcaggcggggctggtgggcgagccgactgcacagccgcctccagggtggactggcaccgccggtaacgtgattaaggccggcgctccgtgacccggcagttcccggctcagcatgcactggagagaagggctcgtgggaacgaggggcgcctgccgcggagctacctgagggagcgggaaggatcctcaatgcccatcaggaatggcttgggtaagggggaattgcacacggcacagggaaggggaattgcacacggcacagggaaggggaattgcgcacggcacagggaaggggaattgcgcacggcacagggaaggggaattgcgcacggcacagggaagggggaactgcacacggcgcagggaaggggaattgcgcacggcacaggtaaggggacaggggacggcgcacagcacacggaagggggcggcacagggaagggggaactgcacacggcgcagggaaggggaattgcgcacggcacagggaagggggaactgcacacggcgcagggaaggggaattgcgcacggcacaggtaaggggacaggggacggcgcacagcacacggaagggggcggcacagggaagggggaactgcacacggcacagggaagggggaactgcacacggcacagagaagggggaactgcacacggcgcagggaagggggaactgcacacggcacaggaaaagggaggccacatggcacaggggaggggacggcacagggaagagaaattgcaccccgcacagggaagggaggatctcttgagcccagggctttgagatcagcctgggaaacagtgagacctcacctccacacaatttaaaaatgtgctgggtgcagtgacgcacgcctgtggttccagctactctggagtgttaggagtgaggactgcttgagcctgagaggtggaggcttccgtgagccatgatcacaccactgccctccaacctgggcgacaaagcaagacgtctcaaaaacaaaaagccaaagctcgaagtgcccggtgggaatgtcggttgagcgggcaattactgattcctactgaaatggcccgagtgcccctccctgggacgcgtttgttgagtcctggcacacaggcggaccgtttaaggtcaccacactgctgtctgtcatggcaaaggcctgcaatcaacgcagatgtccaggaccagggcgtgagtggaataaatgatgtaaccatgaggaagtctggcgtgcacagtgtgggaagaacccctgatgtttgccccatggacacagcaaggtggaagatggatgggtagcacaccctatctgcaaaaacaagggctatgacgcacgtttgaactggcttgaatatccgttgaaaagctaggaaaataactcaggagccactgacagctaacagtggctgcctgatcagggaggcaaagaaaacagatgcagacaggtatgaaagagattgctcattgaacggctttttaaactccatgatgttttgaaccatgtggacgaatgcagtacctatatccaacatgcagagaaacctaatactgtgtggatgacacagtatctacacccaacgtgcacagaaacctaatactgtgtggatgacgcagtacctatacccaacatgcacagaaacctcataccgtgtggatgacgcagtacctatatcccaacatgcacggaaacctcataccgtgtggatgacgcagtacctatacccaacgtgcacggaaacctaacaccgtgtggatgacgcagtacctatatccaacatgcaaagaaacctaataccgtgtggatgacgcagtacctatatcccaacatgcacagaaacctcataccgtgtggatgatgcggtacctatacccaacgtgcacggaaacctaacactgtgtggatgatgcagtacctatatccaacatgcacagaaacctaacaccgtgtggatgacgcagtacctatatccaacatgcagagaaacctaataccgtgtggatgacacagtacctatacccaacatgcacggaaacctcataccgtgtggatgacgcagtacctatacccaacatgcacggaaacctaacaccgtgtggatgacgcagtacctatacccaacacgcacggaaacctaacaccgtgtggatgacgcagtacctatatccaacatgcagagaaacctaataccgtgtggatgacacagtatctacacccaacgtgcacagaaacctaataccgtgtggatgacgcagtacctatacccaacgtgcacggaaacctaacaccgtgtggatgacgcagtacctatatccaacgtgcacagaaacctaacaccgtgtggatgacgcagtacctatacccaacatgcagagaaacctaataccgtgtggatgacacagtacctatacccaacatgcacggaaatctcataccgtgtggatgacgcagtacctatacccaacatgcacggaaacctaacaccgtgtggatgacgcagtacctatacccaacatgctcggaaacctaacaccgtgtggatgacgcagtacctatacccaacatgcacggaaacctcataccgtgtggatgacacagtacctatacccaacacgcacagaaacctaacaccgtgtggatgacgcagtacctatatccaacgtgcagagaaacctaataccgtgtggatgacacagtatctacacccaacgtgcacagaaacctaataccatgtggatgacgcagtacctatacccaacatgcacggaaacctaacaccgtgtggatgacgcagtacctataccccaacgtgcacggaaacctaataccgtgtggatgacgcagtacctatatcccaacgtgcacggaaacctaataccgtgtggatgacgcagtacctatatcccaacatgcacggaaacctgataccgtgtggatgacgcagtacctataccccaacgtgcacagaaacctaataccgtgtggatgacgcagtatgtatatccaacgtgcacggaaacctaataccgtgtggatgacgcagtacctataccccaacgtgcacagaaacctaataccgtgtggatgacgcggcacctatatctcaacatgcacagagacctaataccgtgtggaagacgcagtacctatatccaacatgcatggacacctaataccatgtggatgacacagtacctatacccaacatgcacggaaacctaataccgtgtggataatgtagtacttatacccaacatgcaaggaatctagtgtgtgcaggaaaaacagacactgatgatgaaaatctcagcagagtgttaggagcaagacgatctcatagattaatgtgaaataagcagagaggagaaagactgagggggagccagcacaggacagggctgaggagccccagaatcctcgtgggtaccccttgcagccccagcccatcctacctgtaccggtggaccccacgtcccatggcaggctgcaggcatctcttagagaaggagatgggccctggaaacagagcagtgagaggttccccggtgtgtgcaagcccctcttcctggctctggacccccagtctccccgcccggccctcttagatggctggagacttaggggtggggagcacagccctggccctcccattgctctctcactctgtaactaggccccctgggtctgccgcccacctctgccgtggccttccccgccttctctccacctcggaaggtggtcagcacatcctgccaccttgcaatggctgttccccctgcctggataaccttccccgctctgctctcccaggcagctcctattcaccagtcagggctctacccaaatgccgcttcctcagggaaggcctccggaccgccctacagagtgtatgtccccatggacatcctcactgcctctctggtggacttaccaaggccctgattaaatcattgccgtatttatttagtgtctgagggtagaagtcatgtctgaaatgccacctcgtctaatgtgtccagaggaggccgggcagatagatggcgcttcatcgtgagtgagatcgtgagtgagagttagaggaggccgggcagatagatggcgcttcatcgtgagtgagatcgtgagtgagagatagaggaggccaggcagatagatggcacttcatcgtgagtgagatcgtgagtgagagttagaggaggccgggcagatggcgcttcatcgtgagtgagatcgtgagtgagagatagaggaggccgggcagatggcgcttcatcgtgagtgagatcgtgagtgagagatagaggaggccgggcagatggcgcttcatcgtgagtgagatcgtgagtgagagatagaggaggccgggcagatagatggcgcttcatcgtgagtgagatcgtgagtgagagatagaggaggcggggcagatagatggcgcttcatcgtgagtgagatcgtgagtgagagatagaggaggccgggcagatagatagcgcttcatcgtgagtgagatcgtgagtgagagttagaggaggccgggcagatagatggcgcttcatcgtgagtgagatcgtgagtgagagttagaggaggccgggcagatagatggcgcttcatcgtgagtgagatcgtgagtgagagttagaggaggccgggcagatggcgcttcatcgtgagtgagatcgtgagtgagagatagaggaggccaggcagatagatggcgcttcatcgtgagtgagatcgtgagtgagagatagaggaggcggggcagatagatggcgcttcatcgtgagtgagatcgtgagtgagagatagaggaggccgggcagatagatggcgcttcatcgtgagtgagatcgtgagtgagagatagaggaggccgggcagatagatggcgcttcatcgtgagtgagatcgtgagtgagagatagaggaggccgggcagatacatggcgcttcatcgtgagtgagatcgtgagtgagagttagaggaggccgggcagatagatggcgcttcatcgtgagtgagatcgtgagtgagagttagaggaggccgggcagatagatggcgcttcatcgtgagtgagatcgtgagtgagagatagaggaggcggggcagatagatggcgcttcatcgtgagtgagatcgtgagtgagagttagaggaggccgggcagatagatggcgcttcatcgtgagtgagatcgtgagtgagagatagaggaggccgggcagatagatggcgcttcatcgtgagtgagatcgtgagtgagagatagaggaggccgggcagatagatggcgcttcatcgtgagtgagatcgtgagtgagagatagaggaggccgggcagatagatggcgcttcatcgtgagtgagatcgtgagtgagagatagaggaggccgggcagatagatggcgcttcatcgtgagtgagatcgtgagtgagagatagaggaggccgggcagatagatggcgcttcatcgtgagtgagatcgtgagtgagagatagaggaggccgggcagatagatggcgcttcatcgtgagtgagatcgtgagtgagagatagaggaggccgggcagatagatggcgcttcatcgtgagtgagatcgtgagtgagagttagaggaggccgggcagatagatggcgcttcatcgtgagtgagatcgtgagtgagagttagaggaggccgggcagatggcgcttcatcgtgagtgagatcgtgagtgagagatagaggaggccgggcagatagatggcgcttcatcgtgagtgagatcgtgagtgagagatagaggaggccaggcagatagatggcgcttcatcgtgagtgagatcgtgagtgagagatagaggaggcggggcagatagatggcgcttcatcgtgagtgagatcgtgagtgagagatagaggaggccgggcagatagatggcgcttcatcgtgagtgagatcgtgagtgagagatagaggaggcagggcagatagatggcgcttcatcgtgagtgagatcgtgagtgagagttagaggaggccgggcagatagatggcgcttcatcgtgagtgagatcgtgagtgagagatagaggaggcggggcagatagatggcgcttcatcgtgagtgagatcgtgagtgagagttagaggaggccgggcagatagatggcgcttcatcgtgagtgagatcgtgagtgagagttagaggaggccgggcagatggcgcttcatcgtgagtgagatcgtgagtgagagatagaggaggccgggcagatagatggcgcttcatcgtgagtgagatcgtgagtgagagttagaggaggccgggcagatggcgcttcatcgtgagtgagatagtgagtgagagatagaggaggccgggcagatagatggcgcttcatcgtgagtgagatagtgagtgagagatagaggaggccgggcagatagatggcgcttcatcgtgagtgagatcgtgagtgagagttagaggaggccgggcagatagatggcgcttcatcgtgagtgagatcgtgagtgagagttagaggaggccgggcagatagatggcgcttcatcgtgagtgagatcgtgagtgagagttagaggaggcggggcagatagatggcgcttcatcgtgagtgagatcgtgagtgagagatagaggaggcggggcagatagatggcgcttcatcgtgagtgagatcgtgagtgagagatagaggaggccgggcagatagatggcgcttcatcgtgagtgagatcgtgagtgagagatagaggaggccgggcagatagatggcgcttcatcgtgagtgagatcgtgagtgagagttagaggaggccgggcagatagatggcgcttcatcgtgagtgagatcgtgagtgagagttagaggaggccgggcagatggcgcttcatcgtgagtgagatagtgagtgagagatagaggaggccgggcagatacacggcgccccattgtgagcctgtgattgagtgagtgagtgagatcctgagtgagatcatgagtgagtgagatcatgagtgagatcatgagtgagtgagatcatgagtgagtgagatcgtgactgagatcatgagtctgtgagtgagatcatgagtgagtgagatcatgagatcgtgagtgagatgatgagtctgagtgagatcgtgagtctgtgagtgagatagtgagtgagactgagtgagatcatgagtctgtgagatagtgagcaagtgagtgagatcgtgagtctgtgagtgagtgaaatcatgagtgagatcgtgagcctgtgagattgtgagtgagattgtgagtctgtgagtaagtgaaatcatgagtgagtgagtgagtgagtctgagtgagagaccctcctctaggatcgaggagaacaggagcagaaagaagagctggaggtaggtccagggaaccagcagctggggcatccctgtccccatccccccgagggcagaggctgacctggtcgagggccgtgagggcgcagggctgtgtcagggccagcctggagtccactagcccgcccagcggcggctccttccccgggatgctgttgtagtaattgtgctccaaagagtcctcctcgtccccccaggccgactcctccggccctgccagcctgggggacagacaacaacggccatggcacaggcagggcccaagggggctaaagccttacggcttgagcttctgggggagcaggaaatatctgagttcgaatcccagccccccacctgtcactgagggttcctaccgggaaacgcttctagagccagtgaccaggcccactacttcctcatctataaaatggaatgttgcacacatttccgagctgtagcacaaaaggcaggtcgttggcaaacccagtctccactcctttctgcccacctccggccccgcccggcagcagagggcatgagccaagtttatacccagaaccaggacatcaccggtcagggtggcaactctctgggatcaaagcgcccccgccctctggccccgatggcactggcaggaattgatcctgcaggtgctcctcagcaagcacggccccgagagccagaggggtgcaccccacctggcccacagtcgctgctgggataaattatgaagcagcctacggaaggcagaggcagctctggaggcaggcgaggagcccgtctcagcttcggagcgtgctgagcaacgtgcatcaagcacgctgtccccgtgcacaaaggggtgagtgtgagcaggcgtgcgatgccgcctccctcgtgaccagcaggctgggagctcatgcacctgcacctgccctcccaccattggaggaagctgactttctaatgatgaatagagacttaaatagctccttctccaaggccagctggcaaaccccagcccagggccaaatccagctcaccgcctagatctgtgtggcccacgagctaagaatgggctttcaatctttaaattatcaaagttaagtgtttgagaaaacatctagagaatcatattttgcaacacgtggcattcacacttcaatgtctataaaaaacgtgttaccagcacacagacacgtccccccctttacacatgttctgcggtgagacggaggccgttttctgcccattgcgggagccggccgcgcgtctggaggagggatattggttgtagcagcagggctgacagcctcaggcacaccggggagtcagcttgcttagtcctccccaatcctggggggcaggcggggatgcgtttactcgggtgttaacagccgaggaaacaggatcctctggctgagccatattctcacgggacagggagggagggacaagggcaggacggaggctgaggcctgcaggaggtggagcaggctctgcacctgggcaggtcactgggggtgtccccagggcacgggggaggcagctctggttacctttctgggggcagcgccaccttgggcgggctgtgcaggtactgcttgaagcgcagctcgaaagcttggcccacggtgctgatgatgctctgtgccaggccctcacagcactccaggatgtggcaggctgcgggcacgttggtcatgcagcctccgagccacacggccgtgccccccagccacaggacccccaccggcctccccgggggcctcacctctctggttgatggggtccttggcgacgtaggccacgtaatccgtcatgtcctgggggcggggaggggccagctggacctgcctgggccccccaccgggattcccagctgcccaccccagcaatgcagagagatggggcagtggatgtgggcacagggtacgttaggcgggctctggggaaggatgagagggtctcgcggccggaggggggcggcagggctgcaggtccacccccatccctggcctcaccgtgtctccgcctgacgcgaaggagatggacggcatgtggtggttggcgatgacctgtggcggcaggaggcacacgcggtcatgggggccccgcttcgagggcagggggcccggcagatggaccaggaccacagcgaagagtggggcaggggcagggatgtggggatggagacgtctcctggacaggcacccactgcagccgggtcctgggtcagcctggacgaccgaggctgggatgtggagtccccagcaaggaagggactagggccctaagggatgtgtggggtccgcaggaggtcacacgggaatgtgtgtgagaggacaaacctcccccactgtaacacttcacacatgtacctgcccagacgctcacacacacacaccccaagccccacacacatgcacacacacacacacacccgaagcagccacgggagggacggccccacactcctgactcccttgtccacgtgcaagggcacctgtgagtgcatttgcatgcttatctgcatgctcatttgtatgcttgtttgcctactgatctgcatgctcgtttgcatgctcatctacttgctcgtttgcgtggtcatctgcgtgctcgtttgcgagctcatctgcgtgctcgtttgcgtgctcgtctgcgtgctcgtctgtgtgctcatctgcgtgctcgtctgtgtgctcatctgcatgctcatctgcgtgcttgtttgcatgctcatctgtgtgcttgtttgtgtgctcgtctgcgtgcttgtttgcatgctcatttgcatggtcctgcttcatttgcttcccgtcactcaaatccctctaggccccagtaagcccccgataccagccacgtcctgagtcctccctacagaacatccacttctcagcccccatagggaccctcgaggctctccccttgccaaccccggcccagccaggagggtctgcttggagcctcagtatcctgtccatatagtggtcaggggtccatgcctcgcagggtgggggcagagatggaaattgcgtggaaatggccctcagtcacccccccgccagctccatccttctctagcctcctccctggagccccagctgcccctcaccgccacctgctgccaccacaccagctcagagatgctgtctcaccccaaactcctcacgatgatccatgctaacttctccgacaaggcgatgcctcctctttcagccacacctgagattcccctcctcaccacctcccagagccctccaggaagtctcttctagcacccagagcccagcacatgctcaggacacccctcacctggcctcacaatgcttcctaaaatctgttatttcctctatttctgcaattatagttttttgttttttggttttttgagacagagtctcactctgttgcccaggctggagtgcagtagtgcaatcttggctcactgcaacctccactcccaggttcaagcgattctcctgcctcagcctcccaagtagctgggattacaggcgcccaccaccacacccggctaatctttgtattttttgtagagtcagccatgttggccaggctggtctcgaactcctgacctcaagtgatctgcccacccctcagcctcccaaagtgctggggttacaggcgtgagccactgagcccggcctcacagtgctggggttacaggcgtgagcaaccaagcccgagcctggtctgcaattatacttttgttgtttgtttccacttgaggactgatagccagggtttatccccgcccctccccaggcactgtggatgttgggacggaccactctctggggtggggcgtcctggcccctgcagggtgctgagcagcgtccctgcccccacccactccatgccaggagcgcccctgtatcaggacggctcgcccaggtgggagcccctgagctgagccccgtgagggcagtggctgcacccccagctcctgctcagcggggcctcggctcgtctttctggataaacgccacctgctgcccgcccccagcaccccacctggctttgcctcctaggactcctggcccctctgggggtctggggacgccaggcgaagagggcagacccacctggcgcgtggcaggcacggagaggctgaggccatcagtggagatgtggatggagatgctcatgccggcaaagcgaaggttgctcttgcccaggacggacgccagggccttgttgggggcctgagttgggggcggagcacagcgagggcggctgtgggtgggggctgtcgaggggctcccaggatggccgcagcgtccccacagcccccgactgccccaccagccccacgagagaccacaagcctcactcacctttttcttccaggatccccggacgccaggcacggcctcatggagccggttgatggcttccctggggttgggaggagggggcttagagagtgtggtgggggtggccatggagggagctggggaggaaggggtcagagagggcgggggtctggggagggggcaggagctcagagaagggcgagagagaggggagaggaaggcagagagggaggggtgggagaggatcagggggcctaaagtgggcagggagggggctggggaacctgggggaggagtgccccacaggacaggtgcagcttgggcaccagcccactccacgtgcgtccttgcatccggcagaggcccggcccccagctctggcccctctaccaccctctttcccagggaccagtgtgtccctggcctcggcccacaaggaaggctcggcatcagatgtgggggttggagcagcgagcaggaggccctgagcctgacgcggggtccgtgtcgagatcctgtctgcagcctgagtggtggcaggagctgaccccaaacaagagcgcctcagaccactggtccccaggagaggttagaagtctacagggtcctgaaggggccccggaaatgtcggcgtcacgtggagaaaccagatcccccacccagggcatgtgggaattttcacagcacggccactgtggaaaacagcctgggggctcctcaaaaggttaaaaattggccagatgcagcggctcctgcctgtcatcctagcactgtgggcctgacacaaacaaatgcatgcaggcgcggcggcccccacctgtcatcccaacacttggggaggctgagacgggcggatcacctgaggtcaggggttcgagaccggtctgaccaacatggagaaaccccgtctctactaaaaacataaaaactagctgggtgtggtggtgggcgcctgtagtcccagctactggggaggctgaggcaagagaaatgcttgaacccaggagacagaggttgcagtgagccgacacggtgtcactgcactccagcctgggcaacagagtgagactccatctcaaaaaaaaaaaaaaaaaaggagcaaggctctgacccaggccacagcgcggacacacctcgggaacgccatgctcagtgagagacgccagacacacgaggccacgcagcgtgtgatcccattgctatgaaatgtccaggacaggccgatccacagagacagggaggggatgcgtgggtgccggggctggggaggggacggggagtggctgtgatggggacggggtgttttgatggggtaatgagaatgttcggaactagacagtggtgatcgtgtgactctgtgaagagcctaaagtctcaaactgtacattatatctcacatacgcacgtgtaaactgtctcacatggtttttttaagtctatacgaatggaatcaaccagttttcacagaaaaaaagggtgtcgctctcttccctgcttaagccctggccatatccacagcccctgtgattgctttccagacaccgcatagcatcctgaggtcaccgtgtggaaaacagagcagggacacggagacgccactgggccccggtcccagagggaacccgccaggccctgcaccccacgccgtgcggggacttgcccagcaccctgtgagcgaccggcgtgttctttccatcttagaggatcgaggtctgcagggcacggtgaccgacacctggcgtggggacagggcggagacgtggcgtgaagtgggagggaggtggggggcaccgaggctgcgtcctgggaccccagcgcggctgtcggagagcccatcgctgccgccctccagtgctgccgccctccagtgcgtcactcagccctacgcggccagggcagggttggaggctcacctggtcacctgcgtgcgcgtgttaaagtccagggagcgcatagagcggagaacctcgatgcagcccatgtactgaggggagagaacaggtgtcagatgccatcggaacccccgcagtggagccacgtcccttttcccagcagcccttcgccgcctccaccacccctggggtcgagccctttcctctgtccctggtggctctggggccgtcgtgcctcccccacctcaaggcccagccttgacactgtcctgcgagccgccccctctgactccaggcatgtttttctgtgttgctgtttctcaggagcctggtggttcccccagacgctctatgctgcttgttcatttaaccgtcttgccctcgtcggtctctttctgttccaccagcaccgaagccgaggagcgtggggatggtgcgatcctgagcacttccctatctccagcgcccagttcagggtctggcaaacagtggggcagacgtccagggcagccacagatgcacacactgctggcctcgccctccacaggaagtttgcgggcttctggcccagacagctgtttccatgaaaagggaattcaccatctcaatgactgataatactgagggacgagaggggcagaggcgtcccaccgagtccctgacctgcttcagtgccgtaaagggtgggggaacagggccaggaggcgaaggccacagcgtccttccaacgttggcccttgctggagggagggtaaggggcacagcccacgtcatctctatgaaatgtcctacagaggcagcaagagcatgtgtgggtgccaggagccggggaatgaaggctgacacgaacaggtttcctactggggtcatgagaaattctggaattagacagaaggggtggtggcacgatattatgaatgtacgaaatgctactgaactgtgaaaaatgcaacatgcaaaatgatgaataacgttatgtgaagtccacctcagtttctttaaatgatcaacacgcaaacactttgaccctgcagctccatttttaggactttaccccacagatacatcagcctgagggcttctgaggtgtgtacaggtcactgtgtgggccggcccaggctctgcccctctccacggctccatgtacctggagcagggagagcaaggagcagagacagatgtgagaatgcaggcaggaagcagaggccacaggacctgggctgtgatgacgggcaggggctcatcctgggccagctggggagccagggagcacttaagcagggcatggactaagcagcctcacctcctgttgaatggatgcatgatgggtggatggactgacagaaagatggcaggtggatggatgaatgaaagaatggatggaagatgaatagatgggtgggtgagtgggtgaacggatggatgatgggtgagtggatgatggatggatgggtagatggatggacaggcagatggacaatgaatggatgggtgggtggatggatggagggtggaaggatggatggatgggtgggtgggtagatgagtagatgagtggatgggtggatggatggatggacagatggatggatgggcgggtggatggatggatggatgaatgggtgggtggatgggtgggtggatgggtggatggatggatggacggatggatggatggatgggtgggtggatggatgggtgggtgggtggatgggtgggtgggtggacggatggctggatggatgggtgggtggatggacgggtgggtgggtgggtggatgagtgaatgggtggatggatggatgggtggatggatgggtgggtggatgagtggatgggtggatgggtgggtggacgggtggacggatggctggatggatgggtgggtggatggacgggtgggtgggtgggtggatgagtggatgggtggatggatggatggatgggtggatggatgggtgggtggatgagtggatgggtggatgggtgggtggatgggtggacgggtggacggatggatgggtgggtggatagatgagtggatgggtgggtggatgaatggatggatggacgggtgggtggatgggtggatggatgggtgggtgaatggatggatggacgggtgggtggatgggtggatggatggatgcatgggtgggtggatggatggatgaatgggtgggtgggtggatgaatggatggatggacgggtgggtggatgagtggatgggtgggtggatggatggagggtggatggatggacagatgggtggttggatgggtggacagatgggtagatgggtgggtggatgaatggatggatggatgggtgggtagatgagtgcatgggtggatgggtgggtagatgagtggatgggtgaatggatggacagatggatagttggatgggtggacagatggatggatgggtgggtggatgaataggtgcatggatgggtgggtggatgagtggatgggtggatggatggatgggtggatggatgtgtaggtggatgggtggatggacggatggatggatgggtgggtggatgaatggatggatggacgggtgagtggatgggtgggtggatggatggacagatggatggttggatgggtggacagatgggtggatgaatggatggatggatgggtgggtggatgagtggatgggtggatggatggacagatggatggatgggtggatggatgtgtaggtggatgggtggatggacgggtgggtggatgaatggatggatggacgggtgagtggatgggtgggtggatggatggacagatggatggttggatgggtggacagatgggtggatgaatggatggatggatgggtgggtggatgaatggatggatggacgggtgagtggatgggtgggtggatggatggacggatggttggatgggtggacagatgggtggatggatggatggatgggtgggtggatgaataggtggatggatgggtgggtggatgagtgcatgggtggatggatggacggatggatgggtggatggatgtgtaggtggatgggtgggtggatggatggatgggtgggtggatggatggatggatggacgggtgaatggatgggtgggtggatggagggtggatggatggacggatggttggatggatggacagatggatggatgggtggatggatgtgtaggtggatgggtggatggacggatggatggatgggtgggtggatgggtggatggatggagggtggatggatggacaggtggatggttggatgggtggacagatgggtggattggtgggtggatgaatggatggatggatgggtgggtggatgagtagatggatgaatggatgaacagatgaatggactctaggcatgtagtagacaggtcatacctaaaggaattagccatggtccctgtccctagcactggattctcccactgaggaggcagctttggtgggatgctggctgctcaatggctgtcttctctcaggcagagcatgtgcctctgggatgatgtctgtgccagtgtctggcgctacagggccatagggtgagggattctcattcccttacctgcccccttattaacacgtagcccactccggttgtgcggctgaaaccctgaactgtgtggtccatgggtcccgttgtggggacaccagcctagtgcacgggggaggtggggggcaaaccctctgtggcccacggcagctcacgagaggaaatgcaatatcctattcggttgagaacagggactgcaaactcagatgcctacagccttcaggatcagccaggtaaacacacgaggtaggatgcaatgcagtaacgataccgacacctcgctaactcagggcgcttgtcacgtgtaagtctctgctgcggacacgctgtgcacagcatcctttaatccactgcacgcagatccggtaatgataccaacacctcgctaactcagggcgcttgtcacgtgtgaggctctgctgtggacacactgtgcacgtggtctgttaatccactccacgcaaatccacatgccatgggcagcaatggcccctcgggaaacaggcccgggtgggagggtgactgacctcctgggccacacggcccgcagagctgggtcctgaacccacacccctgggctccaggatctgcactgctccccctgcacgacgggaagaggcggggacctcagctcactgcatgtcccacgctccacggcgcccagtgctgccggccatgtgcttttttaaaaaagagaccagaaattcagggcttttctgtgaaattctcccagtttgtaaatatcgatctagggctgaatatctgtgcccccctcaaaatccctctgtggaaacctatgccccactgtgagggtatttaaaggtgggcctttgggaggtgaggaggctatgagggctccaccctcaggactgggatcagtgcccttataaaagagaccccagacagagcccagccctccaccacgtgaggacacaggagaacacggccctctgtaaagaggccctcgccagacactgaatcttccggcgcctcgatcgtggccctcccagcctccagaaccgtgagaaataaatttctaggcctggcacagcagctcatgcctgtaatcgcagcacttcaggagacctaggtgggaggctgtctcgaagccaggagttcaagaccagcctgggcaatgtaatgaggcctcatctctacaaaagaaaaatttttaattagctgagcatggtgagtgtgggcctgtggtcccagctactcaggaggctgaggtgggaggatggcttgagcccaggaggttgaggctgcagtgatctgtgatggcaccacggcactccag[144 bp omitted]agaaaccccaactctactgaaaatacaaaaataaaaataaaaataaaaaaattagctgggcgtggtggttgcatgcctgtaatcccagctacttgggaggctgaggcaggagaatcatttgaacccaggaggcggaggctgcagagagccaagatcacgccactgcactcgagcctgggtgacagagggagagtctgtctcaaaataaaaaaaaaaaaagacaagcacagagggagatttgagagacagagacacagaagggaggggccgtgtgcagccgaggacaccaaggccggcccccaggcaccagacacgggagagaggcctgggacagagcctccctcagagcctccagcagaaaccagccctgcccacaccttggctcggacgttgggccccagaactgtgacagaacaagtctatgtttgtgtgtgtgtgtgttttgttttgtttttggggtttttgtttgtttgtttgagacggagtcttgctctgtcgccaggctggagtgcggtggtgcgatcacgactcactgcaacttccgcctcccgggttcacaccattctcctgtctc[131 bp omitted]tctcccaaagtgctgggactacaggcgtgagtcaccgcgcccggctgtctgtgttgttttaagccccacagtttgtggtggtttgtggtggcagccccgggaccctcccacagaagatggggaggagccctggcggcttcacattcaaccttcccctttgcaaattcagaaactgaggcccagagagaaggcatgacccagaacccaccccaggacgttaagggaaggagccactgtacaagtcagtaaaccgaagcccagagaggggatggcacctggccggcctcacgcacgcagcaggccagggcagatacaagccgaggtccccatgtctgcactcccagcctgggagaccgtccgagtctccgccaccgcccacgccagccaccgggacccacctcataggctttgccatggtctgtatcgatgtcatttacttggtattttccttctaaataaactccacttacaaacataattgcgtttactttttaaaggaaattgcaggaaacaactaaaatatctatcaacggatgaactgataaatgcagtggggtccatccgcactctggaacgtgacccagacgtgaaaaggagcaagtctccgatacgggccatggcacggacgcaccgtgaggacgccggacaggaaaggccacacagcgtgtgatcccatttctatgaagtggccaagacaggccgatccacagaggcaggaaggggacgcgtgggcgccggggatggggagggggtggaggggagggacggctgagggcaggcgataagtttccattttgcctgacgggagcgtcctggaactagacacgggtgagggttgcagaaccgtgtggctgcactaaatacaccgccctgcacagtttaaacagttgggattagggtatgcgaattatatctgctttttcaaaaatttgcatgagagccgggcacaatggctcaggcctgcaatcccagcactttgggaggccg[131 bp omitted]ctgaggcaggagaatcacttgaacctgggaagcggaggttgcggtgagccgagatcgcaccactgcactccagcctgggtgacaagaacaaaactccatctaaaaaaaaaattaaaaaattatatgagaaaaagaggaaacttcacactgcaaccataactccctggttttccattaaaataaatatattaataaaatgaaaagtgtccattcacacaagaaccctaaggttttgctaaaaccagtgcgtgaaggtttgctgggagctgggagccaggatgtctgcacagtgtcaacatctgtctccccagatcacgttccagggaaggaagaccggatgccggggccagggctggggaggccgcaggcagcgcttgggctggaaacgtgcacggcctggcctgcgagtggctcccggggcgtgcactgcgacgtccccatgcacccgagtcccaattccacgagtccccgcagatcttcctcattataagggaaataaacagagctttacgggggagaaaagtcaccttcaccaagtacattcatttcccagggctgccgtgagcaaaggccacacctgggggccacgggagcggatcctctccacgtcccagagccgggagtctgaggtcaagctgcgggcagggcctcgctccctctgaagccccgggggagggtccttcctgcctcttccagcttctgggggctcccggcgtcccgggcttgtggccgtgttactccatctctgcctcctccacacagctgtctccttctgtgcagatttccctcttcttagaggacacgagccattgcatttaggccccaccctatttcagtaactccagtgtggcctcatcttaactaaccacgtctgcaaaggaccttttccaaataaggacgtgagttttggggaacaccgttcgccccaggacactaggtgatcaaagtctccagcaccagtatcaggacaaaccagcacccgggggcctcctgacacgaagggctgggaaaacacagcacccctctgtgcgtcctgccaaaaacacaacctcgactcaactgcaggcaaacaccaggcagacacaaactgagggacggcagcccagcagccggtgtgcactcttcaacactactggctccatggatcccaggacggaacaactgtgaggctaaaggtggtaaaagagacaggacggacggggcaagtggctcacgcctctaatcccagcactgtgggaggccgaggcagacagacggcttgagttcaggagttcaagaccagcctgggcaacatggtgaaaccccgtctctacaaaaaaaaaaaaatacaaaaatacaaaaagtagccaggcatggtggtgcacacctgtagtcccagctactcgggaggctgaggcaggagaatcgcttgaacgcaggaggtggaggttgccgtgagccgagatggtgccactgcactccagcctgggcgacagagccagactctgtctctaaaaaattaaaataaataaaataaaaattagctgggcgtggtggcacacagctgtggtcccagcagcctgggaggtctcagcaagaggctgaggtgcaaggatcgcttgaacccaggaggcggaggttgcagtgagctgagatggcaccattgcactccagcctggatgatccagagcgagatcctgtctcaaaaaaagaaaaaaaaaggcaggatggctaaatgcaatgtgggatgggaaaataaaggttgctctgacaccgttgggaaaactggtcacatttgaatacgcactgaaaatgtgatcgcaggattgtaacggtacatttcctgactttgttaatcataccatagctatgctggagaaaatccttgtccttagactatataccctagcgtgtttgagggtagaggggtatcacggctgcagactttctcaattgttcatcaataataacgacagtaataataataatttatacagtgggagcctaaggtaggagaatcgcttgaacccgggaggcggaggttgcaatgagccgagattgcgccattgcactccagcctgggcaacgagagcaaaaccgtgtctcaataatgataataataataatttatacagacagaataaatgaggcaagatgttaataatcggccagtctaggtgaatgacacatgggaactctttgtactagtcttctttggaacttttcgtctcaatagaattccaaacttacaaaagctctacgtagtctactgttcttgtttctttgatctaaggttgaaactatttaaaggcaaatttctttgacaccctgcgccacgctgaccagtgccgccctccacccctggccaggaggacgcccctcccactggccacagcccccgtcagtgcccctggccatggctttccacaggggcgaggggtgtgtgctgccctgggggtgccgcggaaatgtggggccctgttggccatcatcgcgaggctgggcagccggcgctacaggaggggggggactcacaatgacaccgaactgtccccagggcctcggagcttcctccaggcatcttgtggggaaagccttccatgactgccacacgcctccaacctaactccacgtggcccatgacgcaagagagtggcgcgttttcgtgtgcttgcttttttattgtggtaaaacacacataacataaaatttagagttttgactgtctttaatcgcacggttcagtggcactcagcgcattcccgtggctgtgcagccaccaccaccgtctctccagaacgtcctcatcttcccaaactcaaactgaccccacaaaacacttactccccgtcccctccccagccccatcctactttctgtctctgtgaatctgatggctctggggacctctgatgggtggaattgcacaaagcttgtccttctgtgtctggagtctctcaccgagtgagacatcctcaaggtccgtccgtgccgtggcctgggtcagagcctcgttccttttcttggccgcgtcgtatttcagcgtgtggatggccacactgtgttgatccactcatgcctgggtcacagcctcgtttctttccttggccgcatcatattgtcatatttcagcatgtggatggccacgccgtggccacgtcatatttcagtgtgtggatggccacgccatggctgtgccgtatttcagcgtgtggatggccacgccgtggccacatcatatttcagcgtgtggatggccatgccgtggccatgtcatatttcagcgtgtggatggccataccatagccacgtcatatttcagtgtgtggatggccacgccatggctgtgccgtatttcagcgtgtggatggccacgccgtggccacatcatatttcagcgtgtggatggccacgccgtggccacgtcgtattttagcgtgtggatggccataccatagccacatcatatttcagtgtgtggatggccacgccatggctgtgctgtatttcagcgtgtggatggccataccatagccacgtcatatttcagcgtgtggatggccacgccgtggccacgtcatatttcagtgtgtggatggccacgccgtggctgtgctgtatttcagcatgtggatggccacgctgtggccacatcatatttcagcgtgtggatggccacgccgtggctgtgccgtatttcagcgtgtggatggccacgccgtgggccacgtcgtatttcagcatgtggatggccatgctgtgttgatccactcatccatcaacagacacctggactgtttccacctttgggctgctgggagttatgctgctgtggccgtgagtgtacaaacatcccctcaagtccctgctctccatttctgggaggtatatatccaagaagtgaaattggtggatcataaggtaattctctttaactttttggcattttttgtttgttttgagacatagtctcactctgtcgcccaggctggagtgcagtggcgtgatctcggctcactgcaacctccacctcttgggttcaagcgattctcctgcctc[134 bp omitted]tgcctcccaaagtgctgggattataggaatgagcctccgtgcctggcagcatcgtttttatacaagttggactaaaatagttgttcactattttagaagccaaatcgtccgtgtgactccagccgtggtgtcggagctgcagaatggcagcctgcatctgccccgtctgtggctgtcacaggaatggtggcctttgtggcggcctctgtgcttcccggagagtggaccctgcacatttacaggctgaaacatattttgagttactaggaatcaccaccattgcgtttctccgtttcactgcggttggggcatcgtactgacttggggggaattcctgcgtaggtgtgcgtttctccatttcattgaggttggggcatcgtactgacttggggggagttcctgcgtaggtgtgcgtttctccgtttcattgaggttggggcatcgtactgacttggggggagttcctgcgtaggtgtgcgtttctccgtttcattgaggttggggcatcgtactgacttggggggaattcctgcgtaggtgtgcgtttctccgtttcattgaggttggggcatcgtactgacttggggggaattcctgcataggtgtgcgtttctccatttcattgaggttggggcatcgtactgacttggggggagttcctgcgtaggtgtgcgtttctccgtttcattgaggttggggcatcgtactgacttggggggaattcctgcgtaggtgtgcgtttctccgtttcactgcggttggggcatcgtactgacttggagttcctgcgtaggtgggtgttacaggtacacttgggtttcatttcaggagtgaaggatcacagaatgcttgctataaatagtggtagttgatcggcaggacggccacacgcagctgcagctggtggatctcagacctgagtgtgactcagaatcacctggaggactcacaaaacgcagctctccaagccccccagagtctctgacccagcaggtctggggtggggctcgagaatcagcatttgcaacaggttcccagatgccgctggtctttaagccagtttggtggccccgttcccttccacaagtgaagggtttgccatttccagccaatggaggagggagaacggccggagtctctcacaaagagctccaggaagggatgacctctgctcccagtggacgtggccgggtcccagcgacgtcgggtgctgtggccaccattttgtgaccctgaaggtcgccaagccagcgtgcagaggacggcggcacagaaagatgggagagactgtggtcacaccgtcctgaaaacagcccaatgttgtctggccttggaagctgagcagggtcgggcctgattggtacttggatgggagaaggacagaaagaacccagatatgggttctttgttctcagaaacaaaacctgagttttgtttctgaggcagggtcttgctctgtcacccaggctggagggcagtggcatgatcttggctcactgcggcctcgaattctcaggctcacgtgctcctcctgcctcagtctcccacatagccgggaccacaggtgtgcaccaccctgcctggctaatgttttttcttttttggtagagacagggtttcaccaagctgcccaggctggtctcaaactcctgggctcaagtgatcctgccgccttggtcttccaaaatgctggattacaggcgtgagccaccacgcccggccagaacccagatctttagggatgctgtcgagccatgggattcatccaccgtgtcaactggccacacctgacccctcgccttcaaggaaaagctgcatttggagctgaaccatctccagcaccctctcacaactccccgcacctcccagcttaagggacccgcgatgcaggaaggatgaagtgtcattttgccgaccgtgtcccagtttgcgtccatcccccaccgggcctgggctccacgcacctggagcagagccagacacgcacaggaaactctccctgaagtgctcacgaggtgaggtgcgtgagggcaccgcagagagcaggacggcctgactcacgggacttctgtgtatggacgagcccagcgccaaaatggtacgtgtgggagaacacggggtcggtgtccacagaccttggcacgaactctggcctctccaggagacaagctctgtgtctttctcaacagagacatcttgctcagatctacgccttcgggtgaagcccaaagatcaggcgtcaagattcacccagaccgagctgtccagcacggcagctgcttgctgcctgtgaccacttgagaaaagtcaggtaaaatgaagctggcactgcaacagcacaggccacacctcgaggcccagccgcccatgtgactcacggcagccacactggacggtgcagacacggacggttctgctgggcagtgccgggctgggctcatgagacccacggcaaagtcggcgggggattctcaggaaaaatgtccccattcacaaaaggagccccacagagacaggggaccctgttctgccaaaccagagccactgcctttcagccaggggaggaactgacccagcagaggccccgggaaggcggtcggtctcccgtggctgccctaacagatccccacaaacggggcttaagacaacagaaatgggccggacgcgacggcgcacacctgtcatcccagcactttgggaggcgcaggcgggcggatcacctgaggtcaggagttcaagaccagcctggccaacagggtgaaaccccatctctactgaaaatacaaacaaaattagctgagcatggtggcgggcgcctgtagtcccagctactcaggaggctgaggcaggagaatcgcttgaacccgggaggcggaggttgcggtgagccgagatcgcgccacggcactccagcctcagcaacaagagggaaactctgtctcaaaaaaaaaaaaagaccatagaaatgcttcctcacacaggcctgagggccggaagcccgtcccctctggaggcagcaggggaaggcccgtcctgcctctcccagtgctggtggtggccggggctccctgacatccttggcccgtggccgcatcgctcgtctctgcccctctcatcctgtcccgcgtccttctctctgtgccctcactcagcttctcataaagacggcagtcaccgggtcagggtgacctgaatccaacgtgaccttgtttaatgacacctgcagagagcctgttccacagaaggcctcattttggggttccaggttggcatgaatttcggtgaaataacaatgacctggacccatgacaaagtcactgagctgctgaattaaccaaccccagagccgccgaccccgggttcttctcgcaggagacaatcaaggtccctttggcgcccagcagctccgagtcaggtctgtggtgacagccctaaaggcatcgcgagtgccatgacccagggaagggctctcgggcagctctttgacctgctgtgcctcagctgcctcatctataaaatgggtggaagccgcagggttgtggggagaatggaacccagggctcctcggaactcagcaccgcgcaggactcggcgtgagcctcggcgccggaggtactgcatttgcaccgatgctgcccacggcgctcggacgcggggcccacgccgctgattatccggcgtccaacttctctcccacacaccgggatcgctgcaggattctggggggttctgcgatgccggctgagtcgcccggcccatccactccctcttgctgctatcaccaatcaccacaaattgagtggctccaaacaacgcgagctaatccgcttatgtctagagctcagaagtctaaaatcaaggtgtgggcagagttggttcccaatctgctccgcctttcccagcgtcctgaggggcccacatcccttggctgggggccccttcctcccggttagcagccacagcgcagcctcttccggtctctctctgactctcaccccctgctgcgaggacaccgggcccccaaatcatcccatctcagggttgctcactcggtcccacctgcaggtcccctgtcgccgtgtgaggggcaccttcacagaatccgagggtggatgtggacacggggccgttgctgtgccccacacaggtgcgtgcgtgacgagtgccctcagaatgttctctccggctcccgcaggaggaccctcagccccgggttctggtcctgcttttcactgcgtaacctcagacacagctcggcctctctgtgcctcagtttccctcagtgcacagggtccctccagtgtggaagagccctgcgggcctgagccgccggccgcagcccccgggtgatggggcttggctattcccctccttaactcaagcttccctgtgaccaggagggaccggctgtccctgtgcctgctgtgatgtaggtgctgggagacggggctcctgggggacagcgctgggggctgaggccggtcaggctccctgggggccagggcccctggtccatcagcaactcctccgggctccaacacaggctcattgtccacttctcccctcacctaggtcccctggcctgggccaccgccgtccctcgcagcctcctcccgggtctctgctgcccttccagaccctcctcctccctcagcaacacttccacacggcccctggaagggctttcaaaactgcacactctgcgccaccccctacttaaaaccacccccactcctcaccacagcccacagagagagtcccgctccctctccatcagctccagtctcatggctctccttgccgtgacgcacacgcaccaggtccgctccctgcgtggggcctttgcacctgctgtgccccccctagaactctgtctgcaaactccaccgcgtcaggcctttgcacctgcacctgctgtgccccgtctagaactctgtctgcaatccccaccacgtggggcctttgcacctgctgtgcccctgcctggaactctgtctgcaatccccaccacgtggggcctttgcacctgctgtgcccctgcctagaactctgtctgtaaacccactgcgtggggcctttgcacctgctgtgccccgcccctagaactctgtctgtaaactccacagtcaggcctttgcacctgcagctgctgtgccccgcctagaactctgtctgtaaacccaccgcgtggggcctttgcacctgctgtgccccgcctagaactctgtctgcaaaccccaccacatcaggcctttgcacctgcacctgctgtgccccgactagaactctgtctgcaaaccccaccacatcaggcctttgcaccagcacctgctgtgccccgactagaactctgtctgcaaaccccaccacatcaggcctttgcacctgcacctgctgtgccccgactagaactctgtctgcaaaccccaccacatcaggcctttgcacctgcacctgctgtaccccccctagatctctgtctgcaaacccaccatatcaggcctttgcacctgcacctgctgtgccccgtctagaactatgtctgcaaaccccacggccggggtttccatggctcaggtctcagcttcaaggtcgcctcctgggaggggcagccgcccagcctcctgctctaatatcacacgattttagctctgcagagccgctaccagaacctatttcctcatctgtttgtcctcttctgattgactgtctctcctactggaatccaagctccttgagagcaggaacgaggtctctcattgtctactcatcatctgtgccgggcaggggaagcgtatgctaaatatttcctgcagtgacggaaagcagcagttatcccccaacatccggagccccaacaaccctggcgtctgaattctgaacattctaaatcccacatccacggccaatggccacacctgactggtcccaatggatgtggtgtgaaggaagcgcacgcgtcctccgtggaacacgccggccgtcggcgttaaacttgtaggacaaaccgccgggagacggcgagggcggcccgatgccaccagggaaaacagacccaaccaggcctggcatccgcacagacccgggggaggcggaagtgggtcccggggaggcggaagcgggtcctggggaggcggaagccggtcccggggaggcagaagagggtcttggggaggcggaagtaggttccggggaggcggaagcgggtcttggggaggcggaagcgggtcttggggaggcggaagtgggtcccggggaggcagaagcgggtcttggggaggcggaagtgggttccggggagacggaagcgggttccggggaggcagacgcatgttccgggggacggggaagtgggttccggggaggcagacgcgggttccggcggagggggaagtgggttccggggaggcggaagcgggtcttggggaggcggaagtgggtcccggggaggcggaagcgggtcttggggaggcggaagcgggttccggggagacagaagcgggttccggggaggcggaagcgggtcccggggaggcggaatcgggttccggggaggcggaagcgggtcctggggaggcagaagcgggtcttggggaggcggaagtgggttccggggaggcagacgcatgttccgggggacggggaagcaggttccggggaggcggaagcgggtcctggggaggcggattcgggttccggggaggtggaagcgggtcctggggaggcggaagcgggttccgggggacggggaagtgggttccagggaggcggacgcgggttccggggaggcggaagccggtcttggggaggcggaagtgggttccgggggagggggaagcgggttccggggaggcggaagcgggtcttggggaggcggaagtgggttccggggaggcggaagcgggtcccggggaggcggaggcgggttccggggaggcggaagcgggtcctggggaggcggaagcgggtcttggggaggcggaagagggttccggggaggcggaagcgggtcctggggaggcagaagccggttgtactgcgcaggccgagcgcgcctggggaccacacgtgggggagtgaggtttcacagccagcttctgggggctcccacaggctttggtgggcccgggcttgaggcccccacctctgcctgtctcctaacggcccgctcctctgtgcatctgagtctaaagttccttctccttacagagacccctgatccaggtaggcctcatcttgactaggttacatctgcaaggaccctgttcccaatataaggtaataaggtcagactcctacggcacaggaattgtagggggacccttctcaactcggtgtagggggaaggaccccactgaacccagcgtagggggaaggaccccactgaacccagcgtagggggaaggacccctctcaactcggtgtagggggaaggaccccactgaagccagcgtagggggaaggaccccactgaacccagcgtagggggaaggaccccactgaagccagcgtagggggaaggaccccactgaagccagcgtagggggaaggaccccactgaacccagcgtagggggaaggaccccactgaacccagcgtagggggaaggacccctctcaactcagcgtagggggaaggaccccactgaacccagcgtagggggaaggacccttctcaactcagtgtagagggaaggaccctactgaactcagcgtagggggaaggaccccactgaactcagcgtagggggaaggaccccactgaactcagtgtaaggggaaggacccttctcaactcagtgtagagggaaggaccctactgaactcagtgtccagaaaagcaaagacacaacccaatgtgaacacaggctaatgttcctggccgcagaggccgggaggagctgggagcacccaccggtagtggcgtgcgggagtggctgatcattttcccagacgccgtaatgactgcagctgtaggacagctgctctctcagaagacgggggactatgcacggcgctgtcacccctgcaggtgacttcacacggtttactataaaccacagagaggggcagacccgtcagcagaggggaaggttaccctcctaggtggaggcgtgctgtgtccaggcgcccgacttccccgtgtgtttgaaaaggttcatttatcataagacccaaggtaaataaacaaaggccgcttccttggccgccctggaagtccctgctgcctcccatctggaatcctggggtctgtccgggcgccagcccctttccaaacaccccttcccgcacccccaccgcaggccagcgtctcgggccccgtctgtcattcgtgaacagctgtccggggggctccggtggcagagacgccccggccgctcgccgctctcggcctcgcccgcccagtccgagtggggggcggtgcacctgcgcatgcgcgcccctcccccgccgccctctccccgcccctccccacgtgacgccgtgggaacccggaccccagcgcctccgggtgggggcagccgccggccgccggccggggatgggggtccggggtggcgggagagcaggaaggatggggaggggacacctggctcgcggggtccgggggtcccggaggagagggtgggggaggggaggccgccgcgaacgggctcccggggggggtgggggggactcacccgcacgacgtaggagaccccgggccccaggaccctggcgtcggggtgtagccagccgtgcgcgggtttgtggatgaagctgcccttccggatccactcggcggcggcggcggcgtccccggaccccgccgccccccgcccgccccgcgacccccgcgaccccgcgccccgacagcggctgagcgcgggcaggggacagggcgcggcgcagcggggctcgcaggcgcccaggacggcggccgccagcgccgggacgccccccgggcccgccggctcgggttgggggtccgcgccccccgaggccccagccgcccgcgccgccgccgggccgcggcccaggaagccgcccggggccgcgaacttccactgcggcattcggggcagcaacgcgcagaaggtggtgggcgcctcgggctcggggggcgcggggggcgccgggggcgcgcgcccgcccggaccctgcgtcatggccgcggccgcccgacggagcccgaccgggcgctgcgcctggcgcggaggaagccctcccgctccgcccgctccctcccgccccccggcccggtgatgtcatccgcccggcccagcgcgcagccgcggggggctgcgcccctgggaccccggccctcctcgtcccggagcctggccgcgaggctggggaaactgaggccctccgaggacaccgggcgctggcctggaacccgcagccaaggcgggacggggctttgaacccagaaccccgtcagcgaccctccccgctgcgccccccacccccgcccgccgcccaagttcgcagaaggaccgagctggagaagcttagaaattccacatcccttctttcccctatttcctagtggggaaactgaggccccgggaggcgcggccagggaaaagagaaccccagaccctaaggtcagcccctccctctccgttgttgcagctagaaggtaccttagggtcacccctatttcttagtggggaaactgaggcgcggggaggggaaggggcgcggccgagggctcacagacgaagctcaaacccaggagtgccggctcgggggtggggggggggggcggggctaggagcggagccgggcccctgctctgcggcctgtcccggcctcagtttctccggctgtaactcaggggagcgggctggagggtcgcggcccttcttccctcacttctggggagcccagtcccgcaccagctcatctgagctctgggcctcagcctcccaggccggtcgctccatccccagcctcaacctctccgagaccggccgcaccttccctggcctcaagggtcggttccttctgcaccagaaaacggggtgtcactgtcaccccgggacccagcctcctggcccgacttggctggagctcccctgcacctgccccgccccaagcagggctgattgccgggaacaaagggaggggccgggacgcgctggcaggtggggagggagggaggggcgaggctgcccggagcccgatcgataattcaggggatgagatcacagccggcgccgcccgcggggccggggaggtgggggaggggagcgaggcgcgcggtcgcgatcggccgtctctgccgcggcgcgtgtcggactcagcccctgcgcgtccgcgggaggagcagatcgtgggcgcgattggtcgggctggagccgcggctggacctgcgcgcggtgtgtgtgttgtgcgcagggtgtacgctgtgtctgggtgcgtgtccaggcatatgcaggggatccaggctgctgggtcctggggtgtgttcacctaatgggtaaagggtgggacaggtttggcggccctaggctgagggctgtgggctgaggagagagcagccccaccaccccctctctgcgccctgcatgcctcccaggctgcatccctcagggaggtcccggggcagtgtcgcaccctcccaagctccgggattagggtctttctggatgggaggtttgtaaggtggtccaggtgccatccctccctggcacacagagggctcagtcacacggcacccccggtgtgtttccttcctgtcccttggagacagtggcaggaactcagtccaacatccagagttcaaatcctgacatcagactgaggtgggggctcacagcatgccccaggacaaatgtccagtctctccaaagcaccatttcctctcagtagatgcccctggtcctgagttgctatgaagcctagatgatctttattaatatccaaaacatagcaagcagctactgatggcagatattagaatacctcaagctcctatacatccttcaaaacccagcttcaatattgcctcttccaggaagcctacctggctgcctgctcaaaagcttggctccacctccggcctcccctcgccctgggtctctcttctggtctctcagaccccctggccactggagggctacgggtctggctctggagggcggcgttcgggtctcttttctgtgacatcaatagacacgttaaggccgggctcggtggctcatgcctgtaatcccagcactttgggaggccaaggcaggaggatcacaaggtcagaagatcgagaccatcctggctaacatggtgaaaccccatctctactaaaaatacaaaaaattagccaggcgtggtggcgggcgcctgtagtcccagctactcgggaggctgaggcaggagaatggcgtgaacccgggaggcggagcttgcagtgagccgagatcgcgccactgcacttcagtctgggcgggagtgcgagactccgtctcaaaaaaaaaaaaaaaaaaaagacacattaaatgagtaagcacatgtgatgctgacagctctccagcccaggaaaggtttattggctaagcaactgtagaaggtggagtgggaaaggcacaggcctcggggctgcctccagcctgagtttgggctgggaccggggctaacccaagctgtgatggggatccaggccctagtggagctggacgccgagttctgggacacaggaagctccatctccagccagctactggggagggccggaaggtgtccctttccccacctggcctggcctggcctggcgtgacctggaagaaactggggcactggaaggagactcaccctgcaccctgcacagggccatgggtcacagcccccagggactggaaggatcaggtgtcctagaaggacctggacagttcaggaaaggggagggaagactcctttcccagcccctctcgccttctagcccctccagccaaagccaggccccaggagaggcccgccagccccccgttcactgtgtgggaaacaggcctggcctagcagcagcggccgggcagcctgtgccccgcaggccgggagggcgtggtggcggccatggtgctggcccgtttcgagtggcggatgcccatagagaacgctggagccctggctttgttcacggtgacctgctctgggcagtgggcgccagggccgggggtctcctccaggggtcgcggggcccggggccgccccagcatggtgaaggcaggcaggcgctggcggtaggtgtttgcgtccgggctgtcgtactggcccgggcctggtatctcagcaggatcctgcggggggcgggcggggggggtgcggcccaccaccgtgtagctggggctgctgggcttggtgaagatctgtgagccccacagagggggcatggtgtaggcattaggggcaggggctgaggtgtccaggggcttcagggggaggcggcagcccagggtgaaagccggcggtgtccgatggcgcacagggggcaccttctctgggctgtaggccccagggcctggcgtcacctccggacctgagagagtggggaaggaaaggtggcactgatgtcctcacctgcccagagacccggcctggctccccatggcccacatgcaccctggagcttacaacgcttctcaagcagcctgggtgcctttctctcccttccccatcctccatacacatggtctgtgtttcaagcctccaggactttgcccaagctggacccagggccaagcacgccttcattttccacccctcctccctgctgccttccccagcccatccagggtagagccctcacagcccttccagagccccacagcctgggttttcccctctctccagacgtgagcacactgaggtgggatggtctgcacctgcatctaactgccccaccagactgggatcccataaaaaggaaggcatgtcaaatttactccaactctccagcagttgactgtctgagttgatgggtgaacaggataggtaggaggtgagtggttgagcggggagtgaatggttcatgaagggatttgtaaatggatggatgagtggatgatggatggatggatggatggatggatggatggatggatggaacggttgataggtagaaggaaaaaaggaaggattcatagatgagtgggtaggtgggtggctgaatgggtgggagggtgggcggatggatggatggatgagtgagtggatgggtggatagatgatggatggatggatgggtgggtggaaggatggataggtggatgggtgagtgggtggatggatggatgggttgatgagtggatggatggatgggtgggtgggtggatggctgggtgggtagatgctaggtgggtcaatggatgagtggatggatgggtggatagaatgttgggtggatggtggaaggaggggcgggtggatgggtggatggatggatggatggatggatgatgagtgggtggatgggggatggatggatgtgtagatggatggatggatgagtgagtggatggatgaatgggtaggtggatgggtggatggatgggtatgtggttggatgggcgggtggatgggtgtgtggattgatgggtaggtgagtagatggttggatggatgagtgggtgggtggatagatgggtgggtgggtggatgggtgagtggatgggtgaatggttggctggatgggtgagtggatagatgggtaggtgggtggatggatagatggatgagtggataggtagatgggcaggcaggtgggtgggtggatgggtgcaggtcggtgtgtggatgggtgtgtggatggatgggtgggtggagggatgagtgggtgggtagatggatgggcagatagatggttgtgtgggtgggtgggtggatagatgaatgagtgggtaggtgaaaggatggacagatggatgggtaggtggatagatgggtgggtgggtggatagctggacagatgggtaggtgggtggatggatgagtgggtgggtggatggtggatggatgtgtggatagatggatggatgggtgggtggatgggtgggtggatgggcgggtggatggatgggtggatagatggatgagtggatgggtggatggttgggtgggtggatgctaggtgggtggatggatgagtggattgatggatggatagatggttgggtggatgctggaaggacgggtggatagatggatgggtgggtggatgggtgggtggatggatgagtagatggaagggtggatagatggttgggtgcagggtggatgtatgggtgaatagatgggtgggtgggtggatggatgagtgaatggatgggtggatacatggttaggtagatggtagatggatgggtggatagatggatgggtgggtgggcgggtgggtggatggatgagtggatggatgggtggatacatggttaggtagatggtggatggatgggtgggtgggtggatggatgagtggatggatgggtggatagatggttgggtggagggtggatggatgagtggatagatgggtgggtgggtgggtgggtggatggatgagtgaatggatgggtggatacaaggttaggtagatggtggatggatgggtggatagatggctggatgggtgggtgggtggatggatgagtgaatggatgggtggatacatggttaggtagatggtggatggatgggtggatagatggatgagttggtgggtggatggttgggagggtggatgctaggtgggtggatagatgagtggattgaaggatggatagatgtttgggtggatggtagaagcatgggtggatagatggaggggtgggtgggtaggtgggtggatggatgagtggatggacgggtggatagatggttgggtggagggtggatggatgggtggatagatggatgagtggatgggtggatggttgggtgggtggatggatgagtggattgatggatgggtagatggttgggtggatggtggaaggatgggtggatagatggatgggtgggtgggtgggtgggtggatggatgagtggatggacgggtggatagatggctgggtggagggtggatggacgggtggatagatggttgggtggagggtggatgggcgggtggatagatggatgggtgggtggttgggtgggtgggtagatggatgagtgtatggacgggtggatagatggttgggtggagggtggaaggatgggtggatagatggatgggtgggtgggtgggtggatggatgagtggatggacgggtggatagatagttgggtggagggtggatgggcgggtggatagatggatgggtgggtggttgggtgggtgggtggatggatgaatggatggacgggtggaaagatggttggtggagggtggatggacgggtgggtagatggttgggtggagggtggatggatagatggtgggtgagtgggcaggtggatgggagaatggagtcaggcaggtgtgtcaggtgtgcgggcaaactgttgggtgcctgtgaaggatactgccgatttgccacagtccccattcacctctcacctcctgacacctaggccagctgcctctgtggccatgtgtgcccagggcctctgtcatcctgacccacttcactcattcagttctcccagccccagtgggcactgcagtggcggcccctcctccgtgtcccttggatttgatcactccaaagactctgcattctaagaactccaaggataagagggggagggaggacagggcaggagagtcgctgagaccctggaaagcaggtccttgtgcggctgcttggctccagtactcaccccgagacttggcccggccctgcatggagtaggcaggggtgcagctgcggccaaagcgtgtgactttggggtccaagaagtagatggggcccgggctggtgtcctgaggtggtgctggggagaggagcccagagtgctgagagtgattctgaagacagtgcctgccccaccgcccggcctcagtgcccctcttggccccgagacactcccaccaggtcagaggccaccccagtcccatctcggaggggtcaccccaggggccctgagttgtggctgcctgaactgggtgcctcaggtctctgctctgactctgtctcctcacagtcaaagtgattctgctctgctgctgtttgtagccacctctgcccctctaacctctgcgcaggtgtgggctggagaaccagctcgtgggtttgttggaactggacataattaggctgggtgtggtggtgcacacctgtaatcccagcactttcagaggccgaggcaggagggtcacttgagctcaggactttgagaccagcatgggcaacacagcaagatcccgtctctactaaaaatttaaaacttagccagacatgttgacatgcacctggggtcccagctcctcggaatgct[131 bp omitted]caagagcgactaggctctgaaccagggcttcggcttgctggcaggtcgcatgcttaagaggggggctcggcgttggaccacgttcaaatccagcagggcctcttgtgagctggtgaccttggccaagttatttatcctaagcctattttcctcatcagcatgttgagaaaatcaaaaagtgagaggatccacagaagggagtgatcctgtggccttgcacttcccgattgagaccgtttgctgctttcaccattattgccacgccaaagcacaaccagtgacagatgcgcaggcacctgtgtgtagcagcgtgaccggtgttcacggccccacagaccgtctgtgcacacatgctgtacatgtggcagtgagccacgggtgagggaggaaacgtcatccacaccttcgccctcccctgaggagtccgtggcacgcagtgtggcccagacacggctccagacctccccgaaacatcatccaaacctttgccctcccctgaggagtccgtggcacgcagcgtggcccagacacggctccagacctccccgaaacgtcatccaaacctttgccctcccctgaggagtccgtggcacgcagtgtggcccagacacggctccagacctccccgccacaggcacaagtacttgcacatacgctgtggtccccaacgcaggctcactggccagactccaagggtgatcactgacccttagccacagcctcatcctttgttagactggcaggagggagggggtctatttttagccccttccccaggccctgggcaaatacagtcccccaggactggaagaggctggggagattcttttttttttttttgagggagtgtctcactctatcgcccaggctggagagtgcagtggctcatggctcactgcagcctcgacctcctgggctcaagcaatcctcccacctcagcctcctaactctgggaccacaggcatgcaccaccatgccctgctaattttttattagaaacccttgatcatggctgggtgcggtggctcacgcctgtcatcccagcactttgggaggctgaggcgggtggatcacctgaggtcacgagttcgagaccagcctggccaatatggtgaaaccctgtctctactaaaaatacaaaaattagccgggcgtggtggcgggcgcctgtagtcccagctactcaggaggctgaggcaggagaatcacttgaaccccgggaggcagaggttgccgtgagccgagatcgcaccactgcactccagcctgggcgatagtgtgagactcagtctcaaaaagaaaaagaaaaagaaaaagaaatccctggtcataatcccatcgcccctccacagatgcctgggcctcactcacgtgaccacagactcgcctcaaagtgctcactgtgcagggcttagccatcaggactccccatgctgaagcactgaccttggcctctaccctgcacctggaaccttccagccttttcttctgccctccccaacccctggctcagtgccccgtgagaaatgaacacaccccagctcatcatgacatcactcatctcaaggcctcagcctacaaacaggctctgcctggagttcagttcttctgggggctccaccaaactcctattcatcctacaaaacccagatcccatgttccacttccaagaagcctaccctgggccttcagcaaagtgtgcacgatccccagtccaccagcctccccacgctgtctcgggcccaggaggtgtcctgagactggatttgaacctgggaactcagatcggtctgggtcataggctaagttctttttttttttttttttgcgacggagtctcgctctctcacccaggctggagtgcagtggcacagtctcagctcactgcaagctccgcctcccgggttcatgccattctcctgcctcagcctccctagtagctgggactataggcgcccgccaccacgc[187 bp omitted]tgacgccttcactggcattctgggaccccttgcagcttcctgagtcccagtgtgggctgggatttttgctcattctgaaggctgagaacaggctgctgtcctgcccctcctccagccgcccctcccagcaggcctctgtccaaatccccacacaagacccttccgaccgcgctcccagcccagctgggaccttggagcagcggtagaaaatggagggatggaatttgggagccctgagacctgctggcccgtggtagcagcgccactgatgaacaccaacagctccctgggtgccgggcggggtccacgccggagctgcttcactgcgcccgttctagacaggagcaggcaccatggggcaaggccaccagcctgtggcacagcgagccggtgcaccccatgcctgccctcccgcaggcagccgggaatgtccacagagatacaccacagccctgtgagacgggccaggcccggggagcccccaccttcatggtggagaaactggggctcagggctcagcctcacacccgacagcacacgtttactgagcacttactattttttcttttt[132 bp omitted]tctcctgcctc[211 bp omitted]ctgtcgcccaggctggagtgcagtggtgcaatcatagctcactgcagccccgacctcctgggttcaagtgatcctcctgcctgggcctccccagcagctgggaccacaggcacacactaccacacccagcttttcggctacttttaaaagcatttaatcctcacttaatgaatctcaaaaaggcatctaatccttacaacaggcctgtatggagtctgttattatttttaatataatgttaatgtttt[131 bp omitted]cctcagcctcccgagtagctgggactacaggcgcccgccaccacgcccggctaatttttctttggtatttttagtagagatggggtttcactgcgttagccaggatggtcccaatctcctgacctcgtgatccgcctgcctcagcctccttaagtgctgggatttcaggcgtgagccaccgcaccggcctgctattgttaacttttaacagaaactgagttgcaaagcacttaagcaatttgcctgagtccaggcagcaaggaattgcaaacacggtaaggcaggtacaggtactcacctccttactgcgctctttctccttccattctcattatcaatgaaaaaacagagagggacagcagcttgcctgaggtctcacagtaagtaggaggtggagcaggttgtacagcccagccctgcctgcttcctgccgcactaactgggggcctggatctaaggggtaaggagacccatcagtgctcctggggggagattggaggatcagggaagcctccagccgcccactcgcccgccttaccctcactgggcctccggacgagcgagtaggcgggactggccaccctggtgcagtcgtggttgatgaagcccacggtggacggcaggacatacaagcctggccccgagcctgcagcccaaagccctcaggtcacctcctgggcccagattccccgaagaaggagccctggacccagctcctgagccttagcctgggttcccctctccctccatggtgaggattgggggccccggggagcaagaggctgctgcccgtcggggacaaaatgtgatgcctgcattgtgagtcagacatgaatcacagaggaaaagctggggacagcagcccccctcaccctggggcacagacagggagactggggcctgagcctcccagagatacacggtcacaggtggggaaactgaggcctgagcctcccagagatacacggtcacagatggggagactgaggcccaggcagagatacacggtcacagatggggaaactgaggcccaggcagagatacacggtcacagatggggaaactgaggcctaggcagagatacatggtcacagatggggagactgaggcccaggcagagatacatggtcacagatggggaaactgaggcccaggcagagatacatggtcacagatggggaaactgaggcccaggcagagatacacggtcacagatggggagactgaggcccaggcagagatacacggtcacagatcgggaaactgaggcctgagcctcccagagatacacggtcacagatggggagactgaggcctgagcctcccagagatacacggtcacagatggggagactgaggcctaggcagagatacatggtcacagatggggagactgaggcctgagcctcccagagatacacggtcacagatggggaaactgaggcctaggcagagatacatggtcacagatggggagactgaggcccaggcagagatacatggtcacagatggggaaactgaggcccaggcagagatacacggtcacaggtggggaaactgaggcccaggcagagatacacgatcacagatggggagactgaggcctgagcctcccagagatacacggtcacagatggggaaactgagggccaggcagagaaacacggtcacagatggggagactgaggcccaggcagagatacacggtcacagatcgggaaactgaggcccaggcagagatacacagtcacagatggggagactgaggcctgagcctcccagagatacacggtcacagatggggagactgaggcccaggcagagatacatggtcacagatggggaaactgaggcccaggcagagatacacgatcacagatggggagactgaggcccaggcagagatacacgatcacagatggggagactgaggcctgagcctcccagagatacacggtcacagatggggaaactgagggccaggcagagatacacggtcacagatggggagactgaggcccaggcagagatacacggtcacagatggggaaactgaggcccaggcagagatacacggtcacagatggggaaactgaggcccaggcagagatacacggtcacagatggggaaactgaggcccaggcagagatacacgatcacagatggggagactgaggcctgagcctcccagagatacacggtcacagacgccatgtgttgtggcttctgcagaatctcgatgccacagggatcaggagagaccacagaaccagcccgaggacctggcttggggcctgactccagccgctaattgtgggtgaggaaactgcggcccgtcctgggccctcaccgaggccagcagctgatgtggctcccagcagagccgcctccgcacacgcgcccctcgccctgccccacgttgtctagggcgcccgtccctgagggccacgctggaaatattccctcctccccgcgtctcccgcatgatcgctgtggctttgcccactgctgtacccacagcccctggaaggggacccggctggcaaagcacgcagcttccgttggacagacacatactcggggctcacggcaaccccgtgtccacacccatcctgccggaaggaaaactgaggtctggggaagggcaaggacttgcctgaaactcctgcctcctgctgggctcccagaacattccagaagccccagaagtatggggagtggagcaggaaaaggtcccacccatcccccacggctggcacgcaccgttctccagggtggccgtcccacaggacttcctcaggccggtctccggaatctggccctccgtcactcgccggccaaggggggctgtggccagccgtggggtggagtcgcagctgagggtccccatggtgggcaggcgatggcccccacagcacccacggggcctggtgctaccttctgagccgcagcagctctggcggccacaggcccaggcaccgtccccaccttcacggcctcaccacaccctcccacgaccacagccgcacagacggcctcttgtcccgcagcagggagtcgtggggccctggcccaaggcaggctggtcggccggacactggcctggaagtggggccgggatcgagtgtcggccaggcggctggatggtccaggaaagagtccggtgtcagcagagtgcgtctcccgggagccggcagagctgggcagctggggccagggccggccccagggaactagacctgcaaacatgacacccacagccttgcagcaggagggcctggcggggtcgtgggtggcgtggccccgtttctacacctggggaaactgaggcacagcccaaggtcatacagcaagtacacaactctgggagtttcagctctgagccaagaagcattcactgcctcatcctgtcactcattcctgccaaagcatgtactgggcacctactgtgtaccagcctctgttgggggtggtgagaactggacacgaacagacggaaaagaaggagatgttctcaggatgggagagagaaagtcgtcagtaaatgtgataagtgaacacagtctggtgtatgaggaggcactgaacgtgagggaaaacgcagacaggtttggggcccagggtagcagtgtgggtgtgggtgagccccacggagaaggtaaaactgaacagtcccaaagcaggtgaggaggcagccgtgcagaggccctggggcagcggcgaggacagcggggaggtgagagccgtcctcactgcctcccagatgcctccgagatttaaaccacaatggattttgatacattcaaggcgaccactgcgtgaggctccaagaagaggctcagaaaactgccagatgagatgcacgttcctgtctcttccttgtttgtttctgtattttttggagccttttgcagtgtaatttttttttttttttgagacagagtctcactctgtcacccagcctggagtgcgctggtgcgatctcggctcactgcaacctctgcctcccgggtttatgcgattatcctgcctcagcctcctgagtagctgagattacaggcacccgccaccacgcctgactaat[137 bp omitted]acctccgcctccagggttcaagaaattctcctgcctcagcctctcgagtagctgggattacaggcatgcaccaccacgtctagctaatttt[137 bp omitted]cctcccaaagtgccaggattacaggtgtgagccaccgcgcccagccaatttttttgtatttttagtagagatggggtttctccatgttggccaggctggtttcaaactcctgacctcaggtgatccacacacctcggcctcccaaagtgctgggattacaagcgtaagccaccgtgcctggcctgcagtgtcatctttaacagctttattgatataattcacataccatacaattatacatttcaccctgcaatgtaattttaatgtattgcatgttttaaaattttttaatcaaaatggtatagtctacataaaggatcataaaacaagtcttagtacatatcaaacttttgaaacttacagagcatattatctggtgaaaaaggaattaaaatagaaatcaccaacaatacgatatccaggatcccccaaatatatttagaagttaaacaacatacttctgaataacccacgcatcaaagaagtcatcacaaaggaagttagaaaattttcaaactaaatgactataaaaaatcaacatattaaactgtgtaggatgcagttaaagaagtacttagagggaaaatggttgctttaaatttttatatgagaaaagaaggctgggcacagcggctcacacctgtaatccctgcactttgggaagccaaggcaagcagattgcttcagctcaggagttcaagaccagcccaggcaacatggtgaaaccccatctctacaaaaaatacaaaaatcagccaggagtggtggtgtgtgcctgtaatcccagctactcaggaggctgaggtgagaggattgcttgagcctaaggaggccaaggctgcagtgagccaagattgtgccactgcactccagcctaggcctaagtttccacctaagaagctaggaaaacaagagtaagtataaggaagattgtaaagataacagtagaaatccatgaaattgaaaactgtagaaataatcccttggccgggcactgtggctcatgcctgtaatcccagcactctgggaggccgaggcgggcggatcacttgagatcaggagttcgagaccagcctggccaccatggtgaaaccccgtctctattaaaaataaaaaaattagctgggcacagtggtgcacgtctgtaatcccagccacacaggaggttgaggcaggagactcgcttgaacccgcttgaaccctggaggtggaggttgcaccactgagccaggatcacaccgctgcactccagcctgagtgacagagcgagactccacgtcaaaatcaaaaaaaagagaaaaaaagaacgcctcctccccatcccaaaaaa[137 bp omitted]tgcctcagcctcccgggtagctgggactgcagacacgcgccacgccacggcacgcaggccctgcacggcctcgtctccacctccccctgtcctctcgtcctgctccttcccctttgccgctctactctgaccatccggacctgctttccctccctcgagcccctaagacggtctccacctcggcctctgcctgagctctctctacctgagatgcctctgccagcaaaccaaccctcgctggccccttcctcggtcacgagggcccccagcccacaggccctgtcactgcccaaccttggacacaccatttgctcgtttccagaggcagcacaactccagagccacagcagggatgggtgccgaggagggagagaggaggaaaggccccaacctccctcgaccaaagctgctccttcaccaaaaccagccgaagtgcaggaccccaggggctcccacggctaaagagacagaggggacaagggcctggaaggtgttcccccaaccccatccctcctcacatccgggtcaccaggtccaggccacaccagacagccactaaaggcagacagccagagacttggttccagcccggactcggccccacctgcctccgtttccccattttacgtggggtggaaccaaaagctaacacagggaagacaggatgggaagccggccaagccgacagcatgttgctgggaggacgctgagggccggcagcctcgccagaacgagctggggcccctccagccaccagtccccttctgatctgatcgcaccagattctatcaactctgtcttcagctcagagcttgtcgcaactgccaagcaaagagcttgcaaatgagatgcaaatgaattcaacacacatgcagatgagccctgattttaatcctgcctgctcgacagaagagactaaatcacaacagtgaaaaaaagggaggctggaccggatgagaggccggaggccggccctacgtccacccgcccagctgccggctgcaggcgagggacgtcactgcccggcctgggtgtcctgggtgggaggtgactccgttggtgctcccgagacccttgttctcaccgtaattaggaactcagccagtgtttatttggggccaggccctgctcaggtgctgggaaaacgggagaggacaaaacacacaagttcctcgtcctccctttcccttggagacaggcaggcagataagtgaaacttacgtgagtgcagagggcacgtcgcgctatggaggaaacgtgggcgaagggggtgttggaggccgaaagagtgagggccgtgatcaactcagtataccactggggggctatatgagtagacagcaaactgttctcgtaaatgcagaatgttggcaaactgacaaactgcgtctgccgtgcagaagggctgctgagggccatcaccacccaggcacaaatgtttcctacgattaggcataattgaagcccgtcagtaacaatatgaacctgtgatcaattaagcagctgctcaatcgttacctcctcctctctgctcttgttacccaataaatactaagggctgtagaagctcaggaagctgcctttgctcactaggagcagggagcccttttcttcttctttttctctttttttttttttgggggggggggggatggagtttcacccttgtcgcccaggctggagtgcagtggcgccatctcagctcactgcaacctctgtctcccaggttcaagtgatcctcctgcctcagcctctcgcgtagctgggattacaggcgtgcgcaaccacgcccggctaatttttgtatttttagtagagacggggtt[144 bp omitted]gccaggctggtctcgatctcctgaccttgtgatccgcctgcctcggcctcccaaagtgctgggatgacaggcgtgagccaccatgcccggccccttcttctctctttccttctctcttcttcttccccacgttgcccttcctttaaaatagttacttttaagtttttatttctatttaaaagtttcctttgtttcttgttatcattttctacgtttgtcccttcgttcagtcttataatgacggtctcaggcagtaactgtggcggtcagccacagggtggttggtggtgtgagcgtctgcgatgtgaactgggaggtcgggagcctcgcggagaaggtcacgctccagcagagaccagaggagaagccgaactcgggaggcgggcgaggcattccaggctgacaggaactgcacgcacagaggccctggggcaggacctgcctggtgtgtaggagaaacagcgacgaggcccgtgcagctggagcagcgtgagcaaggagaagaggagccgggaggaagccgatgcggcgggtcctgcacggcctgtggactgtggggacacgggtgacgtgtgagcagggacgcgtcccaatcagagctcacaagcgccctctggtgacatctgggagagcaaaacgtgggcggtgccgggagagggcgtcacatgctgggaaggatgatgaggatggatgacaggaaggatgataggggaggatgatgggaaggatgatggggaaggatgatggtaaggatgatggagaaggatgatggggaaggatgatggggaaggatgatggggaaggatgatggagaacgatgatggagaacgatgatggagaaggaatgtgggaaggtgatggggaaggatgatgggaaggatgatggggaaggatgatggtaaggatgatggagaaggatgatggagaaggatgatggagaacgatgatggagaacgatgatggagaaggaatgtgggaaggatgatgggaaggatgatggagaacgatgatggagaacgatgatggaaaacgatgatggagaatgatgatgcagaaggaatgtaggaaggatgatggggaaggatgatggaaaggatgatgggaaggatgatggagaacgatgatggaaaacgatgatggagaacgatgatggagaaggaatgtgggaaggatgatggggaaggatgatgggaaggatgatggagaaggaatgtgggaaggatgatggggaaggatgatggagaacgatgatggaaaacgatgacggagaatgatgatggagaaggaatgtgggaaggatgatggggaaggatgatggaaaggatgatgggaaggatgatggagaacgatgatggagaacgatgatggagaaggaatgtgggaaggatgatggggaaggatgatgggaaggatgatgggaaggatgatggagaaggaatgtgggaaggatgatggggaaggatgatgagaaggatgatggggaaggatgatgggaaggatgatgggaaggatgatgggaaaagatgatgggaaagtatgatgggaaggatgatgggaaggatgatggagaacgatgatggagaaggatgatggagaaggatgatgggaaggatgatggagaacgatgatggagaaggaatgtgggaaggatgatggggaaggatgatgggaaggatgatggagaaggatgatggggaaggatgatggggaaggatgatgggaaggatgatggggaaggatgatgggaaggatgatgggaaggatgatggggaaggatgatggggaaggatgatggaggatgatggagaaggatgatgggaaggatggtgggaaggatgatggagaaggatgatgggaaggacaatgggaggatgaccgagaaggatgattggaggatgatgggaaaggataatgggaaggatgatggcaaccaagaccaactcatcttcaccaagctcatggtgtagccagaaagttgatcacccacagcagcactgcccaccagaaacagactgagaacctcctactttttttttttttttttttttgagacaatatgttgctctatcacccaggctggagagtgcagtggtgcaatcatagctcactggagcctccaacttctgggctgaagtgatcttcccacttcagcctctggagtagctaggactataggcatgtgtcaccatccctggctaatttcttttttgtgtgtggagatgggatcttgctatgttgcccaggctggtctttaactcctggcctcaagcaatccccctgccttagtctcccaaagcactgggtttacaggcatgaaccaccatgctcggccatttttaaattttctagtagttgtatcaaaaaaagagaaacacgtgaaattaattttaataatacattttattaacccccatatccaaaataatatcatttctgcatatgaacattacaggtgagatatttcacattcttcttttaatgctgtcctcccagcctggcatgttttgcactctctgcctcagtgtggagcgtccacagttccagtgctccagcgtcacctgtgacctgtggacgctgtgtcgggcagcacaggtctagagagtagagcctaggactgatcccttgggccaatggtgctcagccatgggtgttgctgcccccaggggacacttggctatgtctggagacattcttggctgccaggaccaggagtgctgatgacatctagtgactggagaactacaacgctgttcctcccaagagaagaccctcaaatgtcaatggtgtcaagatggggaaatgctgccttagtggatgggcacttattaatcgcctactgcatacagggtgagatcggcagggcgtccttggcatacagcagattactcatgcagaacggctctgctgccagctctgtgctcacaggcgccaccccacgagctgttccatgcctatcaccatggacagaggcggaggtcacaaagccagcaggagtgtggacctaggactcaagtccagaatgttcttggccctgcactgtcctgcccacctacacctgccagtctgaatgtcacccaccctggccgccatcatacgagcaccccagccccgcccctcgacgggcaccgaggctattcccacttcacctcctttacaatttcctgcagtgaacttcccaggcagacctcctgcgcccatgaaccagggtttctggattagacactgtgtggtccctgatgaatcactgcaccactgtgcatgtgtttcctcctctgaaaaacgggcatatgtcagcctgactccacagggtcactctgaagacaagggcatctggccccttatcattcaaacatcctcttccagccttccctcactccagcaaatggcacctccagacccatgctgacttggatccaaacccctggggccgcttcctggatccaaagcccactcagcagctgactgctgctctccacctcacagccacggcccagtccagggccccatccccccccaacacccacccccacctcctcagggatccctgggacgcctctcccagccccaaaaggccactctatgtcagccagagccagctcttcagacatgaccatgggaagccctacagacgcccatcctggctgccactgcgtctagcacaggctcctccccgacagacctccacctgcctgagttccctcaccactcccccaggcatgcaggctcaccctcgttccagtgacacggagctatgagatcatggtgggctgaaatcaacagaccaggggttcccaacccaggtgattgcccccaggggacgctgggcagtgtccaaggacacctgtggtcgtcacgactgggggagctcctggcatggggtgagtgggggcagggatgccgctaggcaccctgcagtggccgggaccaccccacctgggatgtccacagggcctgcggaagaccctgcagcagagagccatcagctcttcctctcatgggtccccggaagctctgggatcaatcaatccccatggggccggctctgggatcaacactgtgtccccagctccccggaagcccctgcagccatcttccttccctctacctgtcagccgccatcctgcctgtaaagccaggccccgctttgcctcttctgtgcggcacgggaaggggacggtgcactcatgagacctcccaccctgcctgtgagatcagtcctggtgtgggtgacagctgtccatcactcacttctgttgctgggcaacgttccatcccatgaagatgccatgatttactcagagcttctaggctgcttctagctcggaacaaccgcaaataatgctgtgaacacatgtctctcttgttttatttatttttttcttttcttttctttttctttttttttttttttttttgagacagagtttcactcttgtcaccaggctgcagtgcaatggcgcgatcttggctcaccacaatctctgcctcccgggctcaagcgattctgctgcctcagcctcctgagtagctgggattacaggtgtgcgccaccacgcccggctaatttttgtatttttagtagagacggggtttctccatgttggtcaggctggtctcgaactcctgacctcaggtgatccgcccgccttggcctcctaaagtgctgggattacaggcatgagccaccgcgcctggcctcttgttttatttttgacacagggtctcattctgtgctcaggctggagtgtgcagtgacgtgatcacagaaaggaaacctcagagcagagttgggtcttcacatacggtggccaggaaggccccctgaagaggtgaaacgttagcaaaggcctggaggaagtcaggacctctaagggatgcccagctgtgcagacatctacggggtgtctggggagggcaccgctgtgcaaaggccctggggcaggaccgcacctggcgaggcggaggagcgaggaggaggccagggtggctgccgcagggtgaggaggggagagcaggaggagggagggcggggctgacccagcaggtcgtgaagggccctgaggacacggagaggacacagggttttaccctgagcagggtgggagccacggaggcctctgctggagcagaggagggcacggcctgaattgggtttgaaggaatcgactgagggtaggaaggtgggggtagggaagcccgggggaggcgagcacaccagcccaggtgggcaccacggggcctgggctgggggctgctgtgggatggtcaggagtgggtgggttctgggcctgtcttgaaggcagaactcacaagattttctgagacgctgtggggtgaaggggagtgagaggaggggagggtcctggaagggcgggtgcaacctcaacccagcggaggaccctgctgacctgcttagttgtttatggagggtcattgccgtgctctaccacgtaacacacgtacacacacacacacaggtgcacgtttacaccacgtgggtgcgcacgatgaggcacacacaggcaggcgcgcacacacacgcgtgctcacataggaacacgaagaggcaggagccgggcgtgcccgagccccgtggcgccctgggcatcccaaacaccgcctgcccagaacaggtgcgcagtgagtgcctgctgagccagtgagtggaatgaagctctacaatagtccagatgacagacatgactgctgtggctgctgccgatccaagtcccaccgttcttttctctagagacaaggtctcactccaccatccaggctggcgcgatcacagctcactgacggtggagaagggtgatcagagaatggtgggaatgaggcggccctgacctcctggggttagcgatcctcccacctcagccccctaaagcaccgggagggcaggtgtgagccacggtgccagccccaagttcccgacattctttcctaaaacacatcctccggctgcagatgagggtgcgacagctgggaggcagctcccaggaggccgggttcctccgatgacctgctgtttctgtgtccctggcacacggcacagcaggagagggggaggccaggtgtttgtggctgctgccaccggcccgtccagggtcagctcatgctcccagcctccgtgatctgccactccccacttccctgaggctgctcactgctgtcctttgtccggcggccagccccctgactcagactcacgcgccctgctgctgcccgcccctttgttcccgggagactctaacaaggaaggcttgttcttcccgcaaggacacagagaacctgccagctcccctccatcctcatccagagagagcctgctgtccccgtgggacagtgaggacaggaccagctctcaggctctgctgggcacccagcccatgcctggcaagtcctcatgttacagacgaggacaccgaagctcagaggaaggaagggcttgtattccgaggatttggggggctggagaggggtcctagtgggctctgctgtagcctgcaaggtcctacaagcccaggtccttcctgccctctctggctgcgttggtccctccggactcagcctctgcactcaccgtacattctgcctgatacacccggtccaactccctccccctccaggaaggccttgctcaaatctctccacctccaggatcttccttggaccactgattgattgattgattttttgtttctgttgtttttctgagatggagtcttgctctatcacccaggctggagggtagtggcgcaatctcggctcactgcaacctccgcctggtgggttcaggcgattctcctgcctcagcctcccaagtagctgggattacaggcgcccg[224 bp omitted]gaggcagaagaatgacgtgaacccgggaggcggagcttgtagtgagccgagattgtgccagtgcactccagcctgggcgacagagcaagactccatctcaaaaaaaagaaggaaagaaatagagatggggtttcaccatgttggccaggctggtctcaaactcctgacctcaagtgatccgcccacctcagcctcccaaagtgctgggattacaggtgtgaaccgccatgcccggcctatcgggaccacagatttgatcctgcaacctgcctatcatcatgctgcctgcccccttccctgccttttccttcttcccagcagcactctccacgcctcacctattgcagcggcggctggagctgctcatgccagctcctgagcccactgtgaagttcgcggcgatctgtgagctggttggctcatgttggcagccacgatgggagtatttacaacacagggggcggcgtgcgctgcaagtgagggccttttcccttggagagccagctgttcaacatttctccgcacagcaccacttcggtattatgcccgaggtttatggcataactagcctggctcatggtctctcttccctgctgctcactagaatgtaagctccttcgggccgaggtcagcccaccttgcactctgctgtctccttggcacttaaaacaacgcttggcatacagcaggcactcaataaagatgtgctggcagggcgcatgacgtgtgcctgtggtcccaacactttggaaggccgaggcgggaggattgcttgagctcaggaggcggaggttgcagtgagtggagatcgcaccactgcgctccagcctgggccacagagtgagaccctgtgtcaaaataataacaagcatgaggcaggggggatcagctgaggtcaggagttcgagaccagcctggccaacatggtgaaactctattaagggaggagaccatccctcatattgtcttatgcccaatttctgcctccaaagaaagaagtaaaaactaaaaggcagaaatgaaatccacaggcagacagcccggcgctgtgccctgggcctggtagttaaagagcgacccctgacctactgggttacgttatctatagattccagacattgtatggaaaagcactgtgaaaacccttgtcctgttctgttccgatctgattgccggtgcatgcagcccccagtcacgtaccccctgcttgttcaatcgatcacgaccctctcacgcggaccccctgagagttgtgagccctgaagagggacaggaattgctcactcggggagctcggctcttgggacaggagtcttgccgatggccccggccgaataaaccgcttccttctctaactgggtgtctgaggagttttgtctgcggctcttcctgctacactatctctactaaaaatacaaaaaaaaaaggccgggc[171 bp omitted]gctgagg[139 bp omitted]gtccctcgcgctgctgggactgacgtccgggtacccccaacgcaaccacggcctcccggtgaccctgacccgcgaagcgggccggaagccccgcagcccctactccagaatccgcgtcccggaacctggatccccgaccgggccctgcggccccgacccccgcagcgagcccagcgccggggaacaggacccggcttcccagtctccgcccggggacaccaggctccttgggcgaacggccaggcctcccgggaccagcgcgctggaagactcgcggcggggacgccccctcggccgccccgtgccgggccccacgcaagggcagccggggcgccccgcagtgggaacgcgaggagaccgaccacggggcgagacagccgccagggcgtccgcgccgcccgccccaagcccgcatcagcccgccacgaactcggaggaccgcgggctagagcggccccgccagcgcgcaaagccttgtgggccacacgccccggcgccccgcgctccgcggcatggcgggagttgtggttcagctgcgggggccgcgcgggagctgccgggagctgtgggcggggtgggtgcgcgcgcagtggcagggccagtgagctgcacccgcggaaaaggagggggagcggctggtcagctgcgccctgcgggtcgagaatgtcatcagcagggatggcggcgctttgagtgctgagcgcggccccgaccgggaccccctacccttgacccaccctcgcaggccgagccccgactcccgacccgccgtcgcagcccgcggccccgacctctgacccgccctcgcagcccgcggccccgacctctgacccgccctcccagccagaccctctacgcccgacccgccctcgcagcccatggcccatcggcccggcagtggacgcagagcctcggccccgttccctccccggaccccccggacccgctctccgtcctccctgcagagccgagggccttggcccagccccgcatcctccccgaccgtgctcgatccagcccgggtgtgctgcacccgaaacaggctcccgggggccgtcgggcctgtgggtgaccgtgcaggccaggatctcccccttcccagtcgtgacaaccacagatggccccagatgccacgttagggttagtgcctcctgggggcgggattgcggccgggggagaaccaccctcccaacccgttaggaactgcagggacggagagcgcgctcgggatgtccagcactcagcgcgggttgggtggcgaatggagagcgagtcgtcctcagaggccgccggcctgcaggcgagaaccctcccagccaggaggctgcggctctgcctgaaccccgacccagggcgaacacccacatttggcccctgcccggtgctgagagaggccagagcggcgtccccagaagcggagcgggagccccacgtccggcggccacgatagaaagaagaaaagaaatgggtggtagtaagtaaaataaatcgtatgaaacataaaacaaggccgggcgcgttggctcacgcctgtaatcccagcactgtgggaggccgaggcaggtggatcacctgaggtcaggagtttgagaccagcctggccaacatggcaaaacctcgtctctactaaaaatacaaaaattagccgggcgtggtggcgcatgcctgtggtcccacctacttggaaggccgtcacagtagaatcacttgaacccgtgaggtggaggttgcagtgagccgagatagcaccactgtactccagcctgggcgacaagagtgaaactccagctaaaaaaaaaagaaagaaagaaacgtaaaacaaagatgtatctttatcttatttaatccactgtgtccaaaatactatcctttcgattcataagcaatacatgttgagatgctgtacactctttgttcacgctgagcgttcagagcccagtgtgtattttgcacatttgtgtccacttcctaattctcacaggaaatattcaacctgcacttcaggccactaaagttctagttggaaaagtggcttcacaaaccctagctgttgcacatgttttccaatagctgcgtccgtttctaagttgatattcgtgttagaaaggaggcttcagggccaggcgcggtggctgacacctgtaatccagcactttgggagcccaaggtgggcagatcacttgaggtggggagttcaagaccagcctgaccaacatggggaaaccccgtctctattaaaaatacaaaaattggccaggcgcggtggctcacgcctgtaatcccagcaccttgggaggccaaggcgggcggatcacctgaggtcaggcgtttgagactagcctgaccaatatggtgaaaccctgtctctactaaaaatgcaaaagttagctgggcgtggtggcaggcgcctgtagtcccagctactccggagtctgagacagaattgcttaaacctgggaggcagaggttgcagtgagctgagatcgtgccactgcactccagcctgggtgacagagtgaggctttgtctcaaaaaaaaaaaaaaagtctacaaatacaaaacttacctgagcatggtggcacgtgcctataatcccagctactcaggaggctcaggcgggagaatcgcttgaacccaggaggcggaggttgcagtgagccaagatctcaccactgcactccagcctgggcgacagagtgactccgtctcaaaaaaaaagaaggcttttaaagaaacagtttagtgccctttatggtgtttgcgacgtcgtgtaaacaccagctctctagtctcaaacccggcgagggcggttcatagacaatttcagtctctcgacgcgacgccgtgtggcttgtgcccttctagccacctagaccctcgggagaggcctgtgcggctcctggctgggcccccgtcttcaaagcagcttttgagtggccctttgacccgtgagacagggccgtggaagctggggtgagcctggagatgcccccgggagcaccaaggcgtcagagcagctgaccagggccccaggcctcgccgcttccccaggcagagccggccccaagccccgcctctcccctgggcggagccagccccaagcccccctcccctgggcggagacagccccaggccccgcctctcccctgggcggagccagccccaagccccccctcccctgggaggagacagccccaggcaccgcctctctcctgggcggagccagccccaagcccccccctcccctgggcggagacagccccaggcaccgcctctcccctgggcggagccagccccaagccccccctcccctgggaggagacagccccaggcaccgcctctcccctgggcggagccagccccaagccccccctcccctgggaggagacagccccaggcaccgcctctctcctgggcggagccagccccaagcccccccctcccctgggcggagacagccccaggcaccgcctctcccctgggcggagccagccccaagccccccctcccctgggaggagacagccccaggcaccgcctctcccctgggcggagccagccccaagccccgcctctcctctgggcggagccagccccaagcccccctcccctgggcggagccagccccaggccccgcctctccctgggcggagccagccccaagccccccctcccctgggcggagccagccccaagccggctctcaccatagtgtgcctcctgccccatggacccccatccccccagacccctcctgattagctcaggtggggctgccgtggagaccacaccagcatcatcgcctgaggctccatgtccaatttccccggggctgctggagactgagcactgccccagcccctcaccaggcggtcactgaccccagggaggcctgtcagctctgcccaggctcagcgacgtggtcagctcggccagcctgcggggagggactcgactcggacaagggtt[132 bp omitted]gcaagctccgcctctccgggttcacgccattctcctgcctcagcctcctgagtagctggaactacaggcgcccgccacca[323 bp omitted]ccatcgtgggcttcatggctacaactccacacgtacacacgcacacacgcatgcacgcacacagacgcatgcacacacacacatgcatgcacatggctacttattgaaccccctcctgcagcctccatcaatctcattcctcccccactctccttgcgaccctcaggtctggggtccttggactgggttcaagccttgtccaacaaggaggccctgccgtgatgggggtcctcactccaaagaaaaagccatgaggaccccagaactgaccagtgggtgggagacaggagagctggcccagctgggtcaagaagggtctgtcagggcctggggcgtgctccgctcctggacaacggcgccctcacagccccttcccctcagggcaacacagtcatctggaacgctccctcggcagctgtggacagggaggccaggatgtggggtctggggctggtgggatggctgggaccctccatgggaaggggggcttcctggctgggaccctccatgggaagggggcttcctgacggaggccgccgaggacaatgccgggaaggggattgatgttgggggcggggtcgagtctcccaaggacaaaaaggaggtccccgttgccggcggaagatacggtgtaggccttcctgtgggactaggactcagacccaggggtctcagggtcctccccggccctcaggctgctggcccacctcggtctctccatccctctgcctctgcctctctgtgtctctgtctctgtctccctgtgtctctctgccttctctcttcctcgctctgtctctgtctctctgtgtctctatctccctgtgtctctctgccttgtctctcttccttgatctgtctctccctctctgtgtctctgtctccctatgtctctcttcctcactctgtctctgtctctctgtgtctctgtctctctctctctgtctctgtgtctccctcacccccgccttccccacctctggccgttgaaacctgcgggtccctctgcctctgggaaccctccctcctccttcctgtgtccatcccacctgccctgtcctcagggggaccccagctttgttgtctccccgcccccacaagcctgtggatgtgagggctcggcacacggggactgtgagcagcgtgatcaccacgcgtgacccagcgggcgggcgggggacagggccctggagagctgggacacaccctgcaaggggcctcagccctcctggcgcccagtggtccctccccacctgcaggaagtagggtcgggggctgggaaacagcccattcaccaggcctgctgccccccgcccgggttaagggcccagcttcccgggaagggcctgcacctccggcctggggagggcccctcctcggagtctgctttccggtgaggcctttcccggcaccagcctgggcaggagggggatgggacccagggagacagggctgtgagctcacacacctgggccctcacctctgaggggactgtttccccaccccgggcctcagtttccctcctctaggcctcagtttctctcctttgcacccagcccctcctctaggcctcagtttccctcctcagcacccagcccctcccccgagcctcattttgcctcctctgcacccagcccctcccctaggcctcagtttccctcctttgcacccaggccctgccctggatctcagtttccctcctctggtcccagccccacccctgggcctcagtttccctcctctgatcccagcccctcctctgggcctcagtttccctcctctggtcccagccccgcccctgggcctcagtttccctcctctgatcccagcccctcctctgggcctcagttttcctcctctggtcccagccccgcccctgggcctcagtttccctcctctggtcccagccctgcccctgggcctcagtttccctcctctgacaggtaagccgattggcaatgcttggaaccccatggactggctgctgctttttattccatggccagggaaactgaggcacagacagaccctgaggtcagcaggaatgctccatcattttattcccgcgtgcctgcggtgcatggggtccagggtcacaggaccggcccctgggtggaggggagccagccatcacgactgccaccacaggccctcattgagctaggagcagagcaccctgggaaccacagcggaggagggtggggggcgagggggtgagggggtgggcagaacctgggtaaggtgaggagcagcccgggcagagtcccagaggccctgggagggtcccggtgatgcaggggggtaaacaagccaccagcggagacagaaccagtgtgcggggcttggaggaacaggtgggtggattccagtgcgtttggaagatgaggttcccaggactcgctgatggcagctgtgagtgggagtccagccagcatcccttccagatccctcttgtggaccgagatccaggtctcagtgtagaccaaggaacagaggcagcccctactcgggctcccaggctccagccaggcctgctaggtgggcggcctctgcccgtgtgatggaaggaagccaggctcagagatggggtgacttgtcccacgtcctggagggtctcacagctccaccacggccaggagacttcagtccagggggcctccatccccagcgaccttcacctgacccccaggggaccccagccaacaagacccggcctgcagctccggaacgggggagggctgctctccaccgcccctgtgcggccgcccgggaaagtgcaggcgggccgggcgcggtggctcacgcctgtgatctcagcactttgggaggccgaggtgggcggatcacctgaggtcgggagttcgaggccagcctgcccaacatggagaaaccctgtctctactaaagatacaaaattagccaggcgtggtgacgcatgcctgtaatcccagctactggagtggctgaggcaggagaatcgcttgagcccgggagacagaggttgcggtgagctgagatcgcaccattgcactccagcctgggcaacaagagcgaaactcagaaaaaaaagaaaagaaagtgcaggggacccgccgtcggggtgggggcggcgctgcccagcctctgtcccacttccatgcacttgacctcgaccctccggcctccgtctgcgatcttcccgtgcctgaatatgaggcttggaacagacccagaccttcctgcctgcccgtcctgagtggccccgggaccccgccccatctttggcccccagcccctgcctctctgccgcctccagggtcgggggtcaggccaggaaagccccttgggaagcccccggggagcagctggagcggggtcgccgggcggcgggaaggagtgggcgcctctatttaagcggcttccccgcggcctcgggacagaggggactgagcatggatttcggactggccctcctgctggcggggcttctggggctcctcctcggtgagaaggggagggggcgcgggagagaggagtgagttaggagggggctcaggagagaggagggggctcaggagaggggagggggctcaggagagaggagagggcccgggagagaggagggggcccaggagaggggagggggctcagtagagtgggggggctcaggagagaggagggacgcaggagagaggaggggcgcaggagagaggagggggctcaggagagtggagggggctcaggagagaggaggggcgcaggagagaggagggggcgcgggagagaggagggggcgcggaggggagggggcgcaggagagaggagggggcgcaggagagtggagggggcgcgggagagaggagggggcgcgggagaggggagggggctcgggggagaggaaggggcgcggtgagcggggaggggacgcgggagagaggagggagttaggagggggctcaggagaggggagggggctcagtagagtgggggggctcaggagagaggagggacgcaggagagaggaggggcgcaggggagaggagggggcgcaggagagtggagggggctcaggagagagaaggggctcaggagagagaaggggcgcaggagagaggaggggcgcggaggggagggggcgcaggagagagcagggggcgcagtaaagtgaagaggactcaggagagaggagggggcgcgggagaggggagggggtttggaagagaaggggggctcgggagaggggagggggctcgggagaggggagggggttcggaagagaaggggggcccgggagaggggagggggcccgggggagaggaaggggcgcggtgagcggggaggggacgcgggagagaggagggagttaagagggggcgcaggagagaggaggggctcggagggggcgcgggagagacgaggggtgctcagagttaaggggctccgagatagggggtgattggtgatcctgccagaggagggggctcggaggaggcaggggctgagaggggaagttgcggggctccgcgcggccccctgacccgcagcgaaactggctccaggcagctggggttcgggggactggggcagaggcggcggtcggggcggggttcagggaccgagcctgggagtccgggtagcggcggggcaggggtccgggggtgcagcggagggtccgggaaccgggcagaggcggggcggggtccgggggtggagcgggacgcagggccggtggcggggcggggtccgggactccgcggggctgagcgagagccgcggtcgccgcaggccagtccctccaggtgaagcccctgcaggtggagcccccggagccggtggtggccgtggccttgggcgcctcgcgccagctcacctgccgcctggcctgcgcggaccgcggggcctcggtgcagtggcggggcctggacaccagcctgggcgcggtgcagtcggacacgggccgcagcgtcctcaccgtgcgcaacgcctcgctgtcggcggccgggacccgcgtgtgcgtgggctcctgcgggggccgcaccttccagcacaccgtgcagctccttgtgtacggtgaggcgtccccccgcgccctgcctctctgacccttggactcccggctccttccctatgccacctcttcctggaagcctcccagattgcaggcagggtcccagctccatgcacagctccccgaagccaggtccccggccttcgcttccctccaactcaccccaactctcccagggccggccctggcccatcctcctgtctattccagcctcccagggtggggccacggggcctgcgcacaggccgtccctactgcctgttcatcagcagcccccacgcatccttggccccagctccaagcccctccgggctccggcccctccatcacgtccagccctgactctgggctcagccctcacccccgaccctccatcacagccttcccggaccagctgaccgtctccccagcagccctggtgcctggtgacccggaggtggcctgtacggcccacaaagtcacgcccgtggaccccaacgcgctctccttctccctgctcgtcgggggccaggaactggagggggcgcaagccctgggcccggaggtgcaggaggaggaggaggagccccagggggacgaggacgtgctgttcagggtgacagagcgctggcggctgccgcccctggggacccctgtcccgcccgccctctactgccaggccacgatgaggctgcctggcttggagctcagccaccgccaggccatccccggtgagtccgctgggtgccctggagacccacccgctcgccagccttgacaagcacttcgggacggggtgggggggtgggggggcagcacctgtgctgtggggcgctgggaggactggattcccccacgcagcgacagcgacattcatcgacgcaacatgtatttgccgagcacctgccccccagcacaggtcccacccctcccctgcccacagcgctccatggctcttgccttggggtcaaagcccaagtcctcccgggggcccacaggaacctgcacgacctaccctgtccccttcctgtcctccctccaccctttctccccctcctcattctgctgcagccacacgggcctcctcgcctcctcgctgttcctccaacacaccaggcgtgatcctgccccggggcctttgcacggctgtgccctctgccgggaatacccttcttccggatctttccacggctctctcctcctccccctcaggtctctgtagaatgttgcctcctccgtgaggcttccctggattcccgtttaaagggtcaacccctgatccccaacgtgtacaaacataggcacacaagcacacacatgtacaaacacagacacacacacgcgtgcacacaggcacacacgcacacgcgtgtacaaacaggcacacaagcacacacgggaacaaacgcacacacccacacgcgtgtacaaacacaggcacacaggcacacgcgtgtacaaacacgcacacgcgtgtgagccccctttcccttctgtttcgtttcttgacaccttggataacatctgacatcccccagtcccgtacattctcttttccatgaccttctcccactgtggctccccaggtgggaatcttgtgtcgcgcacggctgtgtccacagaagctagaacagggcctggggcatagcaggtgctcaataaacccttgctgaatgctcggatgaagacatttaatgtgggccggtgccctggcggtgctcccttcacgctctgtccaatcccgaagcccctgccggcttctcccactaaagaaaaagggatttgtcctcccatggggcaccctgatacccatgttaatggacgtgaggtcgtgagtttcaagcaaagggctcccggggataaagcagaagctgggagacccgggaggtctttgtggtgggggtggggctggggtgggcagagaggaggctggatttgagggatattttacagaacacgggccctcacgggcctcagtctccccatcagtcccacaggggatggagcagaaggccagggcagaaagcccccaagcaccttctctctccacgccagcctcctcccaactctcctcgtccacagcccatcataataaacgcgggacccactcgctctcagggcagcccaaagaggtgactctcacccctttgacagttgaggaaactgaggcacgtggagattaaggaggctgctggggtgatgttgccagtgagtgggggacctggaatgcccggactcccatcctgcccactgtggtgcctcagcttcctcatctgtccagtggacttccctgactgtgggtcctttgtaaatttc[134 bp omitted]catagtgaaaccccatctctattaaaaatacaaaaattagatgtggccaggtgcggtggctcatgcttgtaatcccagcactttgggaagctgaggtgggtggatcacgagattaggagatcgagactagcctgaccaacatggtgaaaccccgtcccctactaaaaatacaaatattagcctggcgtggtggtgagcgcctgtaattccagctactcaggaggctgaggcgggagaatcgcttgaacccgggaggcggaggttgcagtgagccgagatcgcaccattgcactccagcctgggcaacagaacgagactccatctcaacaacaacaacaaattctaggctttatcaactagaacagtaagccgaatagaaacaaaaatgtaggccagccatgggaggctgaggcgggaggatcacttgagtacaggagttccagaccagcttgggcaacatacgagacctcccatctctacaaaaaaatttaaaaattagctgggcgtggtattgcacacctgtggtcccagctactcaggaggctgagtggggaggatggcttcagcctgggaggttgaggctgcagtgatccatgatcacaacactgcactccagcct[142 bp omitted]agaaaccccatctctactaaaaatacaaaattagccaggtgtggtggcaagcgcctgtgatcccagctactccagaggctgaggcaggggaatcgcttgaacctgaggagcggaggttgt[135 bp omitted]gcttggaggggttctggtccaagcccttcatccagatgcggagattgaggcaggagaggcaagcctggggcagcagagaggaaaaaaaaaccctcactctgtttccagtcctgcacagcccgacctccccggagcctcccgacaccacctccccggagtctcccgacaccacctccccggagtctcccgacaccacctcccaggagcctcccgacaccacctccccggagcctcccgacaagacctccccggagcccgccccccagcagggctccacacacacccccaggagcccaggctccaccaggactcgccgccctgagatctcccaggctgggcccacgcagggagaagtgatcccaacaggctgtgagttctggtccctgggggcagggagggtgggaagggctgagagcgagaggttccttggatgaagactttagacaagaaattgccctgcccagccttggtttccccgtctgcccagcctcagtttccccgtctgcccagcctcggtttccccatctgcccagcctcggtttccccgtctttccagcctcggtttccccatctgcccagcctcagtttccttgtctgtccagtgggcttctcttaactgtgggtcctttttgtaaacatcagggactgtgtagatgtcaaggcacttggtaaattctaagccttgtagactagaagaatctttggaatagaagcagaaacaatgcggccacataggtaatttctttcctttttttttgtgagacagagtctcgctctgtcccccaggctggagtgcagtggtgcaacctcgactcattgcaacctccgcctcctgggttcaagcgattctcctgcctcagcctcctgagttgctgggattacaggcacccatcaccactcccggctaatttttgtatttttagtagagatgcggt[135 bp omitted]cccagtgccacaaagaaatagcactcaaacaaatttaattctctcagcaaggccacttttactttctgcagaaagggtgctcattgtagacggaacaatggcgagagcacagctgaacaaaggaaaagcagacatatttatccctcacacatttgggtcgcccttactgctgtgtcctgcatccactggctggagcaggatatcacactcttaaactgatacccagtttgctaacaacctaaaactttcctaagtaggtaagcgcaaaggaggacaaacaaggagaggaagttgcttacgaaagatttgaggaagcagtaacatttccaaataaggaaggggcataagctatgagctaagacttccctgggactctccagatatgcctgggtaagcccaagcaactaactgggctaaagtgtaagaactaatagctgataggaggctttagagtaagaagctattatttctagtgtctatgtctattattttatttgtaaatcaagacgagctttgaagaggaacttttctacttcctacaggtaatttcaaatttaaaagtaaaggcaaggcatgaacccgggaggtagagcttgcagtgagccgagatcgcgccactgcactccagcctggggcacagagcgagactccatctcaaaaaaaaaaatgggccggg[138 bp omitted]gcagcgggcgcctgtagtcccagctactcgggaggctgaggcaggagaatggcgtgaacctgggaggcggagcctgcagtgagccgagatcgcgccactgcactccaacctgggagacagcaagactccgtctcaaaaaaaaaaaaaaaattaaaagtaaaaataatgtggtcgggccaagcatggtagctcatgcctgtaatgccagcactttgggaggccgaggcaggaggatcacttgagcccaggaggttgaggctgcagtgagctgagatcacacctgggtgacagagcaagactcagtctcaaaaaaaaaagtgttggccagacacggtggctcatgcctataatcctagcactttgggaggccaaggaggaggatcacctgaggtcaggagttcgagaccagcctggccaacatggtgaaacctcatctctactaaaaatacaaaaattagccaggtgtggtggcatgtgcctgtaatcccagctgaggattactcgggaggctgaagcaggagaatcacttgaacccgggaggcggaagtggcagtgagctaagatcacgccattgcactccagcctgggggacagagcaagattccatttcgaaaaaaaaaaaaaagtgtggtcatacatttcgcagagcccaatatatcccaagcattatcatttcaacaggtaatcaatataaaatagtatgaaggagatatattacattcctcccttttccccagactaagtcttcaaagtgcagattgtaggctcagcacccttcatggtggtgagccgtcctctctccggtctgcccttttttttttttttttttttttttgagagacagagtctcattctgtcacccaggctggagtgcagtggtgcgatctcagcttactgcaacctccacctcccgggttcaagtgattctcctgcctcagcctcccaagtagctgggattacaggcgcctgccaccatgtccagctaactttgtatttttagtaggcacagggtttcaccatggtcaggctggtctcgaactcctgacctcgtgatccacccgctttggcctcccgaagtgctgggatttcaggcgtgagccaccccgcctggcctggactgcccatttctaaactctaaggtgctatgcgcatttcaaaagggtcatggtaaagtcctttgtgaaatttcagggaacgtggtaactttggaagcacgtgtagcctctgaggggctcctcccttcccaagcctgcagaggcctggagggctctgaccggggtctcctgcactctctccccagcgtccaaacctgcgggtgaccagctgcccgcggctctgtggaccagcagtgcggtgctgggactgctgctcctggccttgcccacctatcacctctggaaacgctgccggcacctggctgaggacgacacccacccaccagcttctctgaggcttctgccccaggtgtcggcctgggctgggttaagggggaccggccaggtcgggatcagcccctcctgagtggccagcctttccccctgtgaaagcaaaatagcttggaccccttcaagttgagaactggtcagggcaaacctgcctcccattctactcaaagtcatccctctgttcacagagatggatgcatgttctgattgcctctttggagaagctcatcagaaactcaaaagaaggccactgtttgtctcacctacccatgacctgaagcccctccctgagtggtccccacctttctggacggaaccacgtactttttacatacattgattcatgtctcacgtctccctaaaaatgcgtaagaccaagctgtgccctgaccaccctgggcccctgtcgtcaggacctcctgaggctttggcaaataaacctcctaaaatgatacaaacgtgtcagttttctcagttgacacccactccgtggagaggagaggtctgagggctccggacagcagagggttgactgtgggtcctgccctgatggctccatctccctcatcccacagtccggggctggagaagaaagtgttagaaatgcttgttccccggtgccgtaaagaaatagcacttgaatataaatgtcatttcctcagcaaggccactgttttactttctgcagaaagggtacactggccagcagttttgccacgagagtatccagaacaaaggagacagggtcatttataacctgacgcgtccaccctactgctctgtccggtttccattggctggaacgggacggtttccattggctggaacgggacctcacattctgtatttatcccgatcggctagcagcttggaacttttaaaaagaggcaaaggcagaggagaacaaaggaaggaagaagtagcttgtggaatgctaagaaaggtaaaaacaccttcaaataaggaagaggaacaggttatgacctaatgcttgcttggaccagtataagcatgccagggcagatatttagcctacattgtgggcactaagaacataaagtatgttgatttccttattacattatatatattcaatataac[331 bp omitted]cccggcctaccacaggcctttgaatacattttgcttctaagagaagttactatttattcctaattagatggggaggaaagtctcatttgaagaggaacctctacttcacgttttacaaagggcatttggtctgcccgccagagattcctgtgctgggaggatggtggaacggtcccccggcaaacagctctcattgccccctgcccggggcaacgcccctgagggacggggacggcacccagcaagctctgcccggggcggggaaacgcgagggcttagtggtttcctcggtgagaagcttaaccaggagtccccgaaagcagtgagggaagatccacagaggtcgcctggggaaacacacccagaggcggcttatggaggagactgcttgtgttttgaggtggctgcgggctgcggagggttgggagggccgggagggcggccggaagcgaggtcaggcgatgaaggcctggaggtgccagcccgggggccctggagagccatggcagagtttacagctctggaggctgcggtgtcagaaagctccctctggcggtcagggggtaacagcgcgggatgctcgcccgtgtggccgccaataggggctcagcgcagctgcagcggagctggggagggggcttctcccacgaggtgagctacgcactcagacgttgactgagttaggcggaaggccaggctgagctcgacccccagcaccaaggctcagagatgaacatgagaaaagggtctgggggccgggcgcggggctgggtccagcagtcctgggcaggtccagccccgcgcatgctccgtcaggcttctctgctaaccagggagactggttgctaggagaccatgctaatgaaggactcgctcactacccaaatggcaagcaatccggctttgtgccagaaacgaagcacttccgaggcagccattttggagtctggcaaaattcaggaccgaggccaaagccaggagagccaatcaatatacacaaagagggaggagaagagagagtgccaataaggacacaaggaaagtggtagcgtacccttgtcacttcccaaagtctcccagcgggataccggtgccctctgcccttaatcaagatggccgccttgggggggctctagcgcacagtggaatatggcggtgcttccggtcccgctgccctcagcgaagatggcggcagtggagaagcggcggcaagcggtaccaccgccggccggtttcacggacagcggccgccagtcggtatcccgggcggcgggggcggccgagagcgaggaggacttcctgcggcaggtcggcgtgacggaaatgctacgtgcggccctgctgaaggtgctggaggcgcggcccgaggagccgatcgccttcctggctcactacttcgagaacatgggcctgcgctcgcctgtaaacggcggcgccggggagcccccgggccagctcctgctgcagcagcagcgcctgggccgcgcgctatggcaccttcgcctggcccaccactcccagaggtgcgcagtgggccggcttgggcgggtggggcagcgatggacttcaactcccagcatgccgcgcgcggctccctacccgcagcgccggcgcaggggcccggggcttgctgggagttgtagtgcgcgatgccttcttgggtgggatggatcggacaaggtgggctggagggtccgggcttcggtccggcgctaggcagcgcgctgcatgcggcgcgagtccttctggccggcttcgccttctgtgatgcctttttgcaggtgctgagtttccccttgcagttcatgattttcaaaatcgtgcagctcaagaggacttggcccgaggtcgcagagccagcccccgagccaggtcctcctagtcgcctccttagcagcctcatgttatccccgtccattcagccagaacgtgaatatttacagagagcagcgcagtcacccagggcccccatcttaggggacaggctcccagcgggcaggtggggattcctggaagagcctggcgatgtgcgggcgggttgcagggaagaggcccagcaggtgcaaatttagaccccgagtgtggggcacacgggaggcgggaaagccacggaatttggctgaagcatgcgaggctgcaggtgcctacgcgcggtgtcccctggctggggccagttctgagcccagggaaggtggttggggactatctgttggcgttggggatggatgggctgatgtcttttgttggggggggggtccccagaagcggagcctgaggtaggcattgtgtgtgcaggtgattttacaagggggtgcgcccaagagaacccaggaagggggtgggaagagcaggcagggaaggatgccaagcaaaggtgccctttcagcctcataaccagggcataagcgcccaccatggcagccctcgccagagtcccagagaagttcggggggagaagagagatggggagtgtcccccctaccacgttcagggtgcacaggtgtccaagatcatactcagataagggtggcagggtgttgggtacctggacaaggagcagacttgctccggtggcccagtggctctgaaggccccgcccgatgatttgctggagccaggtgggaggggagcgggcaagggcaggcccagagggtcagtggagccgtttactgcgatggaaggcccctggtttgaagaagctgccagagccacttgcggattaagttggaggctgggaggagcctggagacaggaaggtagaaagaagcgtctgcaactgacgtggggccaggacagaagactgaactggaggggtcctgaagtcttcaggagagatgagaagagctcaggaccccactctgagggcacctagcccagagagcccaccagagagggtgagaacgtgagaccagaggtgaacggggagcaggaggaagatggcctcccaggacatccggaagagaatctcccaaggaggaaaaggggtcaacagcaggcccaccacgtatggttgttcaggttgagcactgcacaagccactcaccccgtagacactgcagatgaggatatttatatttatattaatttccgagggctgctggaacaaattacctccaacttagtggcttaaaacaacagaaatttattctctcacagttctggagggcagaagtctgaaatcggagtgtcaggaggaccacactccctctggaggctccagggaaggagccttccttgcctccccagcctccagtggcggccagcagtctttggcttgtggccacattgctgcagtctctgcctccgtcgtcacgtggcctcctgtgtgtctctgttctgtgttccctcataaggacaccactaggccccaccctactccagtgtgacctcaaccgcctacatctgcaaagctgctgtctcaaataagctctcagtctgaggttctggatgggcgtgagtttggtgggcaccagtcaccccaggacaggagtggagccattggctggaagagttctcatagcagggactcagggcaagggtggtgctggtggcagatgcatcccggccctgggctcgcctgggctccccagagacacagccagtggggaatgcagaagacaggtgcacagacctgcgtggcatctgattctgtgctcatggagccaggcctgctcccgtcctcccagcaggcagctccggccgcccctccatccttggaccgtcaggaacccctgaggtcacctgaccagtcaggaagagaagcccagagcagccgggcgcggtggctcacgcctgtcatcccagcactttgggaggcc[296 bp omitted]cccccaaaggctgaggggctgactggggctgctcctgagagcatcaccgtggtaggctgggggagaagtcaccccagatcctccctggcaccttcttttgagaaatggcaagctccggccgccagggctggtgatggcagccacagtgtccccctcctgccaccttcctggtcgtctccaaggccccctggagcacacacacagacgttacatgacttgctgaaggccacacggccaccgagggcagagctggggtcagagagccccagagtgcagccccggaggcctcctcagccaccacgttgctcatcctggcagcaagggctgcactgccccctgcaggtcactgccaggaaaacgtgcacgaaaacgaagccccagctgatctgggccagggttcccccgactcgtcctctgggggccgtcctgggtactgcagggccctgagcagcgtccctggcctccacccactccttgccaggagctccccgagtcgtgacaaccacagatgtcccagacaccgcccggcgtctgctgggggcaggagtgggaagcagaagtctaaggtgtagggtggctcctgtctctttctggagacgttccataaatagaatctttcctgtattaacaaatgctcacacgccttacaaaccgctctgtgtaggagccgacacagacggagccctggctgggctcccgctttccattttgcaatcagggaaaccaaggcccagaggccaccgtcacaggcagagctgacgttccagccccggcctcctcctccgagcccagagcttgctgccttcctcttcctcctcctccctcacccgatgattctgctgggagccgcccgggagcccaggaggggcgggtatgcggccgccttgaagtgggctgtcaccttcctgtctcctgccgtcatcatggctgtgatctcaccaggctgtaattacctctttgtgtgtcttcctgcccctcaaggcagctgtggctgagctgcagccctaattacagcccaaaataagcaggtggggcctcccacacgtatgccagctgctgtcctgagcacctggctccagccccgttctcccgtcctcacaagaacccccactccgtagatgcacaaggccaggtgcagaaaaggagagtgcacacagctgggaggggcagacgaacacccgaggcaggcctgggccaggcacagagccctgcacaccgaggggccgcgtggatgcttgcggagctggaccagggctgccgcccccagagaggagagcatttatgcagaagtggtggtggatggcgctgggtaatcccggcccacagacctgtcagtcagaagctgcgagcacgacaggaaccaacaaccccaaacctcagtggcttcaacacaagcaaaactcttctcgcttactctgcaggggacgtccagttgtttttttgttgttttttttgagatggagtctggttctgtcacccaggctggagtgcagtggcgcgatctcggctcactacaagttccgcctcctgggttgacgccattctcctgcct[213 bp omitted]tcacgcagcctgcagtgcagtggtgcaatcccagctcactgcagcctcgaccgcctgggctcaagggatcctcccacctcagcctcccaagtacccgggaccacagacgcacgtcaccacacctggctgatttttaaatttttgtagagacaggatctcactatgttgcccaggctggtttcgaactcctggactcaagcaatcctcctgcctcggcctcccaaagtgctgggctcacaggcaggagccacggcacccccacccaccccccaccaagggcttgtctgatcttgacacgcacctgcaatcatgaccacagagaagtggactgagaagtagcacgatggctcttaacattcccgctgaaagtgggccacgccccctcgcacgtttcagggggcaaagcaaggcccagaggctcaccctcggcggggtggagaagtggcgggtggagaagtggcggagggatccgcggagcagcgctgccgtcgccagccttcgagatgcccctgcaagcctcggctcccggggttcacggcctggtgccgtcccttccccctgcacagccggaacgggactgcagaagcaacggacagagtgtggcctccgaggcgggtcacgaaggacatcgtggtgtccccctccctcctgggtgggttgctggctcggctgggcagccgccatgcggtggggtcgctcgcgcagctcccagggagcacctgcagccgctgccaagagccgcgcgggttcccctgcgggggactgggccgcctcgcgtcgagccccgggggagtgtggccacggcaacctcctaagagaccccaagccagagcctcgcagcaaagccgccgccgagacgctgtgtcaatagtaaatgcttgttggttttgggcctctaggtttggggtgtgatctgtgaggcggcagcagcctgcccggcctcacagcagatcctgatgagaggggccccggtgcggctcctgctgggtcatgcggagaggtcaggcgtgatgggagctcgggccgccgcgctgacactgcgactgcccccagcgcattttggggatgacctcatggatggtaaaagcgcccagcggattataagggccaacaaatggggcctttactacttgggagggaaaaggagcgtacagccagatgggcctagagttgaattgcaggtcgctgccctcctgcctctgggcctcagtttcctcctccatagcagagctttgaccctcgagctcgctgagatggcacgtccatccctaagccctgaactgagcagcagtgatgaccagggaggcacgtgttcaccaggcacccaccgtgcaccggcccagcattactgagcacctactgtgcacccgcccagcatttactgagcacctactgcatgccggccctgcattactgaacacctactgcacaccagcccagcattactgagcacctactgcatactggccctgcattactgagtacctactgcacaccagcccagcattactgagtacctactgcacaccagcccagcattactgagtacctactgcacaccagcccagcattactgagtacctactgcacaccagccccacatttactgagcacctactgcacactggccccacatttactgagcacctattgcatcctggcccagcatttagtgagcacccactgcacacaaccccagcattactgagcacctactgtgcactagtcctgcattactgagcacctgctgcacaccaacctgccccggccccacatttactgagcacctattgcatgctggcccagcatttactgagcacccactgtacacagacccagcattactgagcacccactgcacactggccccacatttgctgagcacctactatgtaccagccctgcattcactaagcacctactgtacaccagccctgtattactgagcacccactgcacactgaccctacatttactgagcacctattgcatgctggcccagcatttacttcactcccactgcacaccgccccagcattactgagtacctaccgtgtactggccctgcattcactgagcacctactctacaccggccctgtattactgagcacccactgcacaccgaccccacgtttactaagcacctattgcttactggcccagcatttactgagcacccactgcacaccgccccagcattactgagtacctattgcacaccagccccacatttactgagcacctattgcattctggcccagcatcactgagcacctactgtgtaccagccctgcattactgagcacctgctgcacaccaaccctgcatttactgagcacctactgcatgctggcttagcacttccccggcacctaccacaggtggcccacagaaaggtgaagtcgtgtgcccaggtcatgccggagggaaggctgccctcctcaccatgaagctgagctcccagaagggaaaagcgtaagccctgaggttggccacttcctctctgggacccttggccagaccatggggctgccctgagcctcagtttccctatatgtcccagaggaagtaacaggccactagcatgaggcctggccgggaactgatggggggagtgaggccagggggttaagcagcccacccagggtcctgcagcggcccccacgctggccacggtgctccctggccactccctggtgccctccacgggagtgtgtgtcacactaccagcacacgagtggcacgtagtaaggcctcaggctcctcactggggcagggaatcgaacccaccccagagccggcagcagggctgacagccttcttctgtaaggggccagatagtgaacatttcagctttgcgtggcagcctccatcctgacattcagctctacggttctggtcggaagctgccacaggccacatgtcagcggactgatgtggttatgttccgataaagctttatttacaaaagcaggcagcaggtcgtatttgaccctcaggctgactgtggggccttgcctgtgggattgtggggagagaaataccaccactggccccgagcagcaactgtcacctgtaatcccagcagtttgggaggctgaggcaggaggatcgcttgagcccaggaggtggaggctgctgtgagccctgattgtaccactgctctccagcctgcacaacacagtgagaccctgtctcaaaaaaaaaaaaaaaagaaaaaatgc[212 bp omitted]gaggcaggagaatcgcttgaacccgggaggtggaggttgctgtgagctgagattgtgccactgcactcca[224 bp omitted]gaggcaggagaatggcgtgaacccgggaggcggagcttgcagtgagccgagatcccgccactgcactccagcccgggcgacagagcgagactccgtctcaaaaaaaaaaaaaaaaggaagaaagaaagaaagaaaagaaaaaaacaaatgtcagttgtgttaaatgttgggcacagtatttggccacatgtaaacaggcgctgctgctgcagggagggagaccagagggtcctggtgttgtgggacaaagagtggagagaccgaaaaaggttcaggagagtttatcaaggtgatcaccggctcagctggacatacatccagaaagtctgagcctcgaacaaagggcttttcctatttttaaacatcgtaaggcgggaactacgtgaggcgggaagcaagttacagaggcgagaaacaaaggcagtt[139 bp omitted]cctcagactcccgagtagctgggactacagacgtgtaccaccacgtcccgctaatttttgtatttttagtagagatggggttt[143 bp omitted]aacttatcggttttgtgaccctgcagccgtgctagggaggtaagcaggaactcgctgggcctgtaataaactgaggaatgtggagttggagagtatagataaggtccactgactacagagagaagacaggctgttaacattctcttttaacttgagtgtaagggtgggggtcacactttgcagcaactttaagaggattttaaaatttctatgactactactattaggttagagctgatttcactaattccttcttcactggggccagatgccccagacagatgcctgccgttgattcaagacatttactgagcacctactgtgggcagggcagtgttctgggcaccagggctataaccaagacgaacttccggccctggagggcaggtgctcacactggtgggagacatgaagctcacagggatgtgggacagcgagtgagacaggatgaccactaggaagaaaacaggaggaaaggagttaggggtcaggggaggcgacatttgaggagagacctggaggagaccagggaggaggtgagggagatctgggggaaggcagtgtcacggcccttgcagaggccctgaggccggtccagttggagctgggaagccagggctggatgggagctgcggggaggagaggcctgagctgggtggaggctgggaggggggaggccaggctgggtgggggctgggaggggggaggccaggctgggtgggggctggccaggctgggtgggggctgggaggatggaggccaggatgggtgggggctggaaggggggaggcccaggctggggggtgctgggaggacggaggccaggctgggtgggggctgggaggggggaggccaggatgggtgggggctgggaggagggaggccaggctgggtgggggctagaaggggggagacccaggctggggggtgctgggaggacggaggccaggctgggtgggggctgggaggggggaggccaggctggggggtgctgggaggaggaggccgaggctgggtaggggctgggacgggggaggccaggctgggtggaggcggggatgagggagacccaggttgggaggaggaggccgaggctgggggtgctggtggggaggggaggcccgggctgggcggtgctgggaggagggaggccaggctgggtgggggctgggaggaggaggcccaggctgggtagaggctgggaggagggagatccaggttgggaggaggcccaggctgggtagaggctgggaggagggagatccaggttgggaggaggccgaggctgggggtgctggtggggaggggaggcccaggctgagggggtgctgggaggaggaaggcctggctgggtgggtgctgggaggagggagccccgggctggggggtgctgggaggaaggaggccaggctgggtgggagctgggaggagggaggcccaggctgggagtgctggtggggtggggaggggaggcccaggttgagtaggggctgggaagagggaggccccggctgggtaggggctgggaggagggaggccaggctgggtgggagctgggaggaggggaggtccaggctgggtaggggctgggaggagggaggcccaggctgggagtgctggtggggtggggaggggaggcccaggttgagtaggggctgggaagagggaggcccgggctgggtaggggctgggaggagggaggcctgggcttgggatactggggggaggagaggccagggctgggagggggctgagaggaggaggcctgggctggagatgctgggggaggagaggcccaggctggggatgcttgggggagggaggcctgggctgggaggggactgggaggagggaggcctgggctggggatgctggggggaggagaggcccgggctggggatgcttgggggaggagaggcccgggctggggatgctgcggggaggagaggccctagctgggagaagggaggcgggggctcaagagaggagcttcagggatagagggtgaggaggaggggaggccggggatggggggtaggaggagaggggaggccagggctggctggggggtcggggaggctagggcataggcctggcgaggaggggaggctggggctgggtgggcgcgcggtctctgccggcccccaacgtccccgtctccgcagggccgccttcaacaacaacgtgagcgtggcctacgagtgcctgagcgccggcgggcgcaggaagaggccggggctggacgggcgcacctacagcgagctgctcaggcgcatctgccgggacggccaagcccccgaggaggtggtggcgccgctgctgcgcaaggtgcagtgccgtgaccacgaggcggtgccgctgagcgtcttccgcgcgggcacactcacctgcttcgtgctgctggagttcgtggcgcgcgccggcgcgctcttccagctgctggaggactcggccgccgccgtggccgaccgccgcgtgggccaggccgtgctggacaccctggagggcgcgctgcaggccagcgacgccgccgcgcccgcgcgcttcctggaggccggctcgcgcttggggcccgacagcctggcgctggcgctggaccgcgccgtcggggggcggcggcccagcgcgcccatgacccgcgaggagtttctggagagggccgccgcgctcttcatcgcgaaggtcaagccggtgggctgaggcccgtgggccgcgcggatccgggatctgcgctggggggtccccgcgtgcggggcgcgcggagccttcccttcgccctggtgaggccctgccataaccaggcgcccagccctgcggaggaggccggggctcccaggaagcggacgcccggtccccacacagcgccgcggccgcccctccacccccgcgggagcccctgccccacgctaataaaatgtgttgcgaggctgacgctggtgtgtatgcgagcgcccgcctcccagccccggtgcccgcagaagacgcttttccccagcaggtcacccacggccccggaaccgcggcgactggaggctggattcgaggccggaaacgccgggacccctggacccggcctggtgggagcagcggagggggacgccccacggggccctgcggagcctgaagccggagagcaggcggctcttctggaacgcagggcccgggccctccagccccgcccggcccaggtatcctccctgagcctcagtctccccagatgtcaaatgaagaggccagctgggcagatggtagtgacattggtgagacaacagccctaacacttcccaggaactgaagtgcctcatgtgattgattcccaggcccaggcagcggaggttacaccctcagcaagggctcagctgggatctgcgcccggcctgctccagaacgcagcccactcgccaccggtggggagggtcgtccggtatcccccagtgcccaccaccaccaaccagaatcacttctcagactgcaagagcgaatccagccgggcgtggtggctcacacctgtaaccccagcactttgggaggctaaggcggcggatcacttgaggtcaggagttcaagatcagcctgaccaacatggtgaaaccctgtctctactaaaaatacgaaaaaaaaaaaaagctgggctgtggtggcaggcgcctgtaatcccagctactcaggaggctgaggcaggagaataacttgaacccaggaggcagaagtggcagtgagccgagattgagccactgcactccaatctgtgcgacagagtgagaccctgtctcaaaaacaaaacaacaacaacaaaaaaaaaacaggccagacgcagtggcccacgcctgtcatcccagcactttgggaggcagaggcaggtggataacgaggtcaggagatggagaccatcctggctaacatggtgaaaccttgtctctactaaaaatacaaaaaatgagccgggcgtggtggcgggcacctgtagtcccagctactctggaggctgaggcaggagaatggcgtgcaccgaggaggcggagcttgcagtgagccgagatcgcgccactgcactccagcctgggtgacagagcgagactccgtctcaaaaaaataaaaaaataaaaagtgaatccagaactccagctccagttgctggcaggtgacttcactcccttggcctcagtgtctcctgttaaatgggagtccccacagcctgttctggtggagggggtccaatcggacatagagaacactcaagccttgtttctcccctgctgtcaccgccacatcacagtcatccacacagaaaagacttctgtgaccacatgtgggagcgttttttcccacacaccaaccagcagacgccagccgggtgtcctcttaattcagctctgacgccttctacccagagatagtgtcagatcccacaggccgagggctcagtccccgagcctctccctcttcagacaccagttgcgaatctgggcttccaggacttcggtctggccgggttcaagttggggttcccagcacccctttgggttcaattaatttgctggagcagctcactgaactcggaaacacttgtgtttcctggtttactataaaggatgtggcaaagatagcagaagaagggaccacaggtgaggtacgtgtagggtggggattggagtgccatgaggatgcacagggcaccatctcagagcttccaggcatctccacatgttcagctcttggaagctccccagaacccagttctctagggtttcgtggttttttgtttgtttgttcatttttgagacggagtcttgctctgccacccaggctggagtgcagtggcgcaatctcggctcactgcaacctccccctcctgagttcaagcgattcttctggctca[222 bp omitted]cccaggggtatagggcaggaccctctttggggagggtcccaagacccgtaatcgaaaaggtaagattagagctctgcagcccagaggagggcgggagattatttcctgaggcctaacgagctcagcagtgcagcaaaagactgcaactagggcttcaggagctatgatccgggaactgaggaagaaaactactctctattctaacaccacacacgggaacagaattttattttattttaattttttgagacagagtctcgctctatcacccaggctggagtccagtggcgtgatctcggcttactgcaagctccgcctcctgggttcacaccattcgccattctcctgcctcagcatcccgagtagctgggactacaggtgcccaccaccacgcccagctaattttttgcatttttagtagagacggggtttcaccgtgttagccagtatggtcacgatctcctgacctcatgatccgcctgcctcggcctcccaaagtggtgggatgacaggcgtgagccaccgtgcctggccttctttttttttttagacggagtctcgctctgtcacccaagctcgagtgcagtggctcaatctcgtctcactgcaacatctgcctcccaggttcaaataattctcctgtctcagcctcctgagtagctgggatcacaggcacgtgccaccgtgcctggctaatttttgtatttttagtagagatggggtttcaccatgttggtcaggctggtcttgaactcctgaccttgtaatccacacaccttagcctcccaaagtgctgagattacaggcatgagccaccgtgtctggccgggaacagaatttttaaatttttacaagttccacgatggcagagaccactcctgtctcccagtttcccagcactgagctgggcttaggataggtgatcaatgaaccaatgaatcaatacaggaatgaatcctggcaaatcgcctgtttcccaaaaaaagccacaataatggttccactccccgccgcagaggcagatggagaggtagaatccgcatccccctgcgggactggagctccttccaaggcagggcccctgcgggacgctcaccctctggactgggcaccagctgcgatgcctgcgctgacggcagctcctgctgtgcagactcaggagctgaataaatgacagttgtggttctaggctaccaaatttggggtgattcattacgcagcaatgagtaacaaagattaatgaaaggtgcccactccatccacaggtgctgttaggctaccacaaacgccccttacaggtgtgagccttacaggtcatacgccagagcatttcagtgagcacgggccgggggctcagcagcatttccggtgagcacgggccgggggctcagcatttccggtgagcacgggccgagggctcagcagcaattccggtgagcacgggccgggggctcagcatttcagtgagcacgggccgggggctcggcatttccagtgagcacgggccgggtgctccgcagcatttccggtgagcacgggccgggggctcagcagcatttccggtgagcacgggccgggggctcagcatttccggtgagcacgggccgggggctcagcagcatttccggtgagcacgggccgggggctcagcagcatttccggtgagcacgggccgggggctcagcatttccagtgagcacgggccgggggctccgcagcatttccggtgagcacgggccgggggctcagcggcatttccggtgagcacgggccgggggctcagcggcatttccggtgagcacgggccgggggctcagcggcatttccggtgagcacgggctgggggctgagcaacaggacacaaaacacaggagagccgggcgcggtg[311 bp omitted]ccgaagcccacagccaggcaggctgaggtgggcttaaatcctggacacccggacagggacgcagggcacggaggcttccaggagtgaccaatcagaggacaccaaagctggtcccagggtgcacctcacactccgccccggtcccttgaggccaaggccgaccgaagcccacctcccctgccccgcccagctccccggggcctcccctgatccctgaccctgtgccgcccactgtgcccgccctcaggtcccgaggaccccgtctgtcctaatcccggcatgacccttaccagcgcagcccggaagctgacgcgtcctccctggcctcacagcagcatagagcgcggcaatcccctctggcagcacccacaggctcctgccccaccccacagtcccccttggaagcttcctctctctccccagctcctctggtggcttcatccagggcctcccctcctcccaacagtcctctgctggctccctggggacatcccaagcctgacacatccaagacggagcttccggccggctccctggaccccgggctcctccagagtttctggtctctgtggaagcctctcacccgatccactgagcactgagaccacggccagacgccttcccgggctccacagcggccctcaccacacctcatcctgaggcaccctgcctgccctcccttcactgcccccggctggtccagccaacaccctcgcccacctggacccccagcccttcaccgcccccggctggtccagccaacaccctcgcccacctggacccccagcccttcaccacgcccccggctggtccagccaacaccctctcccacctggacccccagcccttcaccgcccccggctggtccagccaacaccctcgcccacctggacccccagcccttcaccgcccccggctggtccagccaacaccctctcccacctggacccccagcccttcaccgcccccggctggtccagccaacaccctctcccacctggacccccagcccttcaccgcccccggctggtccagccaacaccctctcccacctggacccccagcccttcaccgcgcccccggctggtccagccaacaccctctcccacctggacccccagcccttcaccgcccccggctggtccagccaacaccctcgcccaaatggactcccagtccccaccagccagtcaaagcatccctcccccagcctcagcgatgggttcagagaaacccagctggccagtgagatgcagccgggagctgtttccgggagcgcagtgctgggcggctgggttgggtgcatgggctagactttgcagccctcacctccgccatgtctgcgaataaagccggcactcaggacagctgagcgggaggctccccagcgtcttctcacctctgtcccgcactcaccacccagaccctgggcctctagccagtcgggctgtccccacctcagggcccctggacgtgctgttccctctccctgcagcactgttcccgcagacctgcctgctgcttccccacgccacctgggtctctgcttatatgtcacctcctgagtccaagatgccttcctacaccatcccggtggctctctaacccctggcattctttagaaactgcttatttatgtatttatatgctggtttgtggcctctctccctgtgaacccaagggcaagaagtttactgcttttgttcactgctcaatccccagaacctagatttacacatagaagagaaggaagagaaggagagagggaaggagggcaagggaagggaaggggaagggaatggaagggaaggggagtggaggggaggggaggggaaaggaggggaaaggaggggaaaggaggggagggggataggaagagaggggagggggatgggaagagaggggagggggaggggaagggagcagaggggaggggaggaggaggggaggggaagggaggggaagggaagagagggggagaggaagggagggaaagaaggaagcaattttcccctaggaagaagctggaagtcattgaggtgtgttaatccctgtagctgtagtaacaaatttagtgacttagcgtggacgtaccatctcacagctctggaaggcagaacttctaaaatcgaggcatgaacagggctggtccctcctgggggctccagggagaacctgtttcctcctttcccagagtccagaggcgcccgcatccctcagctccaggcccttcctcccccttcacctccaagagcgcaacctcttccagtctctgactctcggcgcccgccccccaccgccctcttaaacggaccctgtgaggacatgggcccccatcaccccggatgctctgccgtctcagggttcttatcacacctgtagagtcccttttgccacctgaggtggtacagccacagattctggggatcaggatgtggatgtcttgggggccttattccctcttccacggtgaggaactggcccgggactgcacagaggaaagctgacctggaagcctgttctgatgcatctggaagcacacgggccccacagccttttgcgtttttcccctttttttttttttagacagggtctcgctctgtggctcaggctggagtgcagtggtaaaatcacagctcactgcagcctcaaactcctgggctcaggcgatcctcctgcctcagcctcccaagtagctgggaccacaggtatgtaccatcacacctggctgcttaagaaacatttttttttttttttttttttttttttttttttttttgtggagacgaggtctggccatgttgcccaacgccccacagctgctgtgtcctggctccctgtccctctcccctgaggaccatatcctcccacatgcacccctctgccttctgagaactgtctttcttccctacaaggcatgagagcagcaagatgccatcgtgtaagagtctcagtgacatcttgggctccacaggaagacctttgtacaactatcttatctaacccactttcaaattaaaaaactgaaagtcgggctgggcgcggtggctcatgcctgtcatcccagcagtttcagaggccgaggcaggcggatcacctgaggtcaggagttcgagaccagcctggccaacatggcgaaaccccgtcactactaaaactacaaaaattagccgagtatggtggcgcacctgtaatcccagctactcgggaggctgaggcaggagaattgcttgaacccaggaggcagagattgcaatgagccaagatcgtgtcactgcactccagcctgggcaacagagtgagactctgtctcaaaataaaataataaaataaaataaaaaactgaaactcataggccaggcacggtggctcatgtctgtaatcccagcactttgggaggccaaggagggtggatcacatgaggtcaggagttccagaccagcctggccaacatggtgaaaccccatctctactaaaaatataaaaattagctggcatggtggcacaagtcacccacttgggaggctgaggcaggaggatcacttgaacccgggaagcaaaggatgcagtgagaagagatggagccactgcgctccagcctgggtgacagagcaagacgccatctcaaaaaaaaaataattaaataaataaattaattaaataaacctgagactgggtttaatgtttgagcgatatttccaaggtcgtggcagaaactagatttgaatttaaggttcttctctgccatgtgatggaaaacctaactcaaactggcttaattaacgaagaaggaatttatttttacttatttatttatttttgagatggagtttcactcttgttgcccaggctggagtgcaatggcgtgatcttgactcaccacaacctccgcctcccaggttcaagcgattcttgggcctcaccctcccgagcagctggaattataggcatgtgccaccacgcccggctaattttgtatttttagtagagacagggtttct[131 bp omitted]gtgtgcacgtgtggtcccagctacctgggaggctgaggtgggaggactgtttgagcccaggagttcaaggccagcctgagcaacaggaacgggggcagggagggaggaaaggaaaataaactaaaaaggctgggcgtggtggctcacgcctgtaattccagtactttaagaggccaaggcaggaggatcacttgaggctgagagatcgagaccagcctggccaacatggtaaaaccccatctctactaaaaattcaaaaattagctgggtgtgacagtgcacgcttgtgatcctagctacttcggagacaggtgggaggattgcttaagcctgggaggcagaggttgcaatgagctgagattgcgccactggactccagcttgggtgacacagagagactccatctcaacacaaacgaactaagaggcaagaattcatgagcttgcatcattggaacatccaggggaggtcaggtaacagcatgatgcaggatcactaataggattatcaacgtttcccctctcatcagccggctcggctttcctgtgatgccgcctttgttcggaggccccgtggtgacaccatgaccccgtaactccagccccaggtccttccagctcagccaccccagcactgtgatcccagagaaatgtcccagagctgaatctcattggacgtcaggagtcacatgcttgttcctgaaccaatcattgcagcccagggtgggggccctgggaactgatgggatggcccctccctgcagccagggcttgcgtcagtccaattcgaacccgttcccacagagtagggagcccccaagcaggcaggtggaagcccctggtgtccaccgctcccgggtgctgtgagcctgagcctccctgggggtcggggccctgtgggaccagctggaggggcttgaaaatctccccaacccaggccgggcgcggtggctcacgcctgtaatcccaacactttgggaggccgaggcgggcggatcacgaagtcaggagatcaagaccatcctggctaacacggtgaaaccgcttctctactaaaaatacaaaaaattagcagggcgtggtggcatgcgtctgtagtcccagctactcaggaggctgaggcaggagaatcacttgaacccgggaggtggaggttgcagggagccaagatcgtgccactgcactccagcctgggcgacagagcaagactccttctcaaaaaaaaaaaaaaaaaaaaaaagcgagagaaagaaaacctccctcacccacacagtgcttcctgggatgtgggtgtacggaagaagagagatcttgggagcccttagagaaggaatcgtggttaattctaattagcattaatttacccatgagctgctgcctgccggctccatgatgctggcaatatatccacgacctgtggcacggaagagactgaggctcacaaaaccctgggaaccttggtgaaggggccacagccagaaggccccactagtcccgagaccctccttttactccaggcccccagggtgccgggcagaggggcctgagggaggaggcccagaggcccttacgggtgaggacgcctcggcctcggccctggacagctctggaagtgaccgctcggcccagagctctttcttggatccctccctccctctccactcctgatgctgttttcctttccccagacaggtttgcctgctggtcctcttccggggaccagactcatgaagccggggccaggtgttggggcacctgcgggacagagtggccctggtcccagactggtttttgtttttggttttttttttttttgagacggagtctctgtcgcccaggctggagcgcagtggcgctatctagactcactgcaagctccgcctcccgggctcacgccattctcctgcctc[135 bp omitted]gccccccaaagtgttgggatcacaggcgtgagccaccgtgcccggcctgtatgttgatgcagctgtgtgtacccagggcatagcaacaatgccactggcacagtccgagggcagggccacccgtcacgggcacgactcaggggaggctgggctgccccgtcctcaccacggccagttctcccgaccaagcttcacagcaaggagcatgtgggtgtctgggcagccactgagccaggtcagaagtcaggtggggtcacagtgatgcccggaatcagctggggtcaagactcaggtgggctgggcgcggtggctcatgcctataatcccagcatttgggaggccgacgcagacggatccctttattagtccaaactgcatcctccccttcctttcaaaacctaacaacacacttgaggtcaggggttcgagaccagcctggccaacatggtgaaaccccatctctacttaaaatacaaaattagccggacgtggtggcgggcacctgtaatctcagctactcgggaggctgaggcggacactagcttgaacccgggaggcggaggttgcagtgagattgtgccactgcactccagcctgggccacagaacgagactctgtctcatttaaaaaaaaaaaaaaaaaaaagactcgggtaggacaaaggtcaggctgggaggagggcacagccaggctcgggctcagcttggggtgggggctccgtggggctggcgcctctcccgggtcaggtgctgagccgatgctggccggcgtaggcctctttcccagtttctctggggggcaggagcaccttgccaacctctgatggctccagcgcctgcactcgcctcacaccacatggtgacttcaacggggaccagggaagccctcgcccctcccacccctcagagccctccccgacctcgcccacttctcagagctcccgctgtcgggggaaccgaggcagcgccgcgcctggaagccaggtctgcggatcccgcctcgctcccgccccttcctcccttccgcgtggccagcgcgaccctaggacagacttcgcgcccgtcccctgcacagacggggaaacggagacggggacgcggggtcgcgccggatggaccggccctgcccctccggtcccggtcaggaccccgcgccgcgccccgttcaccgcccgcggccccgccccgcgccggcacgtcacaaaacaaccccaaagccgggggaccgggccggtgacggcgcagagcagccctgcccgcctccttgcgcacagcgtccgcggtgctggtcgagcagggggcgacggcggcggcctcggggatcggaagagcccggggctgcgcgctcgaaccctccctcccggcggaggcgctcggcgccgtaggcgggaccggggccgggactccacctcccggcgtcccctgcggccgggcgcgcaggcgcaagtcggacctggccgcggagcgcaggcgcagtcggggccaggcggtgcgcgcaggcgcagcggggggcggggcgcgcgggcccggccaaggcaagcgccggtggggcggcggcgccagagctgctggagcgctcggggtccccgggcggcggcggcggcgcagaggaggaggcaggcggcggccccggtggctcccccccggacggtgcgcggcccggcccgtctcgcgaactcgcggtggtcgcgcggccccgcgctgctccgaccccgggcccctccgccgccgccatggctcggccgctagtgcccagctcgcagaaggcgctgctgctggagctcaaggggctgcaggaagagccggtcgagggattccgcgtgacactggtggacgagggcgatctatacaactgggaggtggccatcttcgggccccccaacacctactacgagggcggctacttcaaggtgagcgcggcgacccccgcccgggtcccggagcccacgagcgacctcgggcgccgggaaccagctccctgccccgcggtcctagcgctgttgctgggcgggccccgaagcctcctggcttgggctcgtttcccttctatggccacgttcccccacccagctctgcccggccccctcctcggaccgtctcggggaccttcagcctctgctgcagtcctcgaaaatccccagttcccttcaaggcatcgtccggtcccctgttaggctcttggcccccggaggggtggccgggggccctccctgtagcatctgggcgtggggctcttgcccacctcctccttggcgggggctggaccccggctgcctccccctccgcccctgcgagaaagagggagcggagcccaggccgcgccggcctttcagctgccctccccgccctccccggaggagacaaagaggcccccccagaccccgtagctgctattgttggggagctgggcccgtgagcgggggagcgaggccagcctgggggtggctggcgcggccactcgctcagtctccaacaaaggcccggatgagccttggcagccaggacccgcctggaaagcggccacccttgccagtagcagccggccaggcgccctgggctccatcccctgctttatgtaacctgcgccctcgggaaggccgaagtaggggcgtgcctcccacctgctccctgcagctctctccaggcctcccggctcgggcccgcgtcccggaccccgacctcagaagctccgggctcgctcatcccagctggtcttggcctttctcagagtccactgaacaggtggcttcttgggacccaaaccccgagttctgggccgtttcttctgccctctggcggtttaattccaagcagtttctggatgtttttgttgttgttgggagcggggaggctgtttctgtctcatgtgaaaaggactcaggccaaaaccagggcagttttcttgatctcacgatccagacgtgacctttgacttcttttagcgttcagggacctcgttcttggggccagagggacaaagcgaggggccctgtgtgagcggtggggaacgagcaccctgtccaggaatctccccctcccaccgtcacttcctgccaagagcctggacacgacacgacactgcagggcccggcccgctctgccccggccagctgcgggcgtggggccgagggaccgatgcctcccgcacgatatgtgtctgctctccgagctaattagtgtctgaaccgcacccgctcagcggctgtgagggcagcagcctggtctgctgggggcgattcctgagcagagagtgggacgcccgtgggttctgcatctggaatcctgcgtccccacacagggaacagagtttgggtctcgaggttgccaaatggttttagcagctcctccgccagccccttctgtctgcttgggggagcagctggctgaggagccgcagccccacctcgaagccaggcctgtgaggcggctgctgttctggaaggaggggatgggggtttctggctgctgtgcccaccagaccggttgccagggattgtgggcagagcttcctgggccagcattaggggataatccggttttccggatttcccagggagggggcctctagacatctgccacagggtcagtcctcagaagccagtgttgagacgggggtgctgccacccacgaggactctcccttcccgctgtgcctgggagggagttgggggagcgtggaaatacagaacctgctgagtgcccagggccgctgctgcccagccactgcctgcagctgctgttccttcaggagccaaagtgagccctggggcaggggccgccagagagagccctccacagccgacttgctgtctgcccttggcagggcgctttccttttctgagcctgggtttgctccggggaaaagacattcttagaggtgcccaaaataagaggctcattgggacttggtggggtttggtacagatgaggccttggctgttgtcaaggattgccgcctgaaacccagcaccaggcttggggggcctgaagtcttggggaaccgcaggacagttctgagactgaagttccagccttgctctgtggccgcggccaagtcacttgccttacggggcaccagtgagttccctgtcaaacagaggacaccccccaagacaccccgcgtgccctccctgtccaggaggggcccgtccacgatccaagacccccaaagtgccctgcctgtccgggaggggcctcgcccacaatccaagacccccgagtaccctccctgtccagacctcgcccacgatccaagaccccctgagtgccctccctgtccagacctcacccacgatccaagaccccctgagtgccctccctgtccagacctcgcccacaatccaagacccccgagtaccctccctgtcaaggcctcgcccacgatccaagacccccgagtgcccgccctgtccagacctcgcccacgatccaagacccccgagtgccctccctgtccagacctcgcccacgatccaagacccccgagtgccctccctgtccagacctcgcccacgatccaagacccccgagtgccctccctgtccagacctcgcccacgatccaagacccccgagtgccctccctgtccagacctcgcccatgatccaagacccccgagtgccctccctgtccagacctcgcccacgatccaagaccccctgagtgccctccctgtccagacctcgcccacgatccaagaccccctgagtgccctccctgtccaggcttccaccacgatcgctctgggggtgctgctctcgtgccttggagtgctgagtgccaccaggacccctgacccagacaacctctgtgtctggcactggggcccagcaggaaaacagtgaggcttccttgtttacctgctgtggcccaggagggccgtgggtggcatcacgccccaggctgcaggccagacagctctgtcacctggcacgtggcttcaggcctccctctgtggccgtccttgccagcagatctggacctccagggcctgggtgaccacagggggcgatgctgacagggaaggagtcctgccaggtttctgtgacctatgggtctgcctgcctgaccccccaagaccggacacctgagggcagacggccatactgactcatcccctcccacggcctgggccagggcaggtgtcacaagtgtttgctaactgagcaatcatctgtgctaaccctccccacaccctggctgccaaggccctggaggtgcagccctggtcctgggcttcagctccatccaaggggagcctggagcccctgccagtccattctgtctgctggtgggtgcccctggcctgggtcccatatgcctgacctgggctgccacgggcctggagccacgcgggcagccagtgcccacgttccccagcagttgtgctgggccgggtcccggccacctggactgtgtaggagctgggatcagctcgggtgactcagaaaaggcttcaggcagccttctggggacttgaccccaggcctgtgagagtccctgccttgggcaggatacggtgtccctcacacacaccctcaggcaccagcactgggagtgggatggccttgggcaccttgtgagctggggcaggtcttggggctgggctggactgagccacctgccttctgcccctgcaggcgcgcctcaagttccccatcgactacccatactctccaccagcctttcggttcctgaccaagatgtggcaccctaacatctacgaggtgagcgcggcccccacgggcctcaagtcctcatcctccgggacccagggtgctgggagcctcacgtcctcatccttccgggacccggggcgctgggagcctcacgtcctcgtcctccgggacccggggcgctgggagcctcacgtcctcgtccttccgggacccgaggcgctgggagcctcatgtcctcgtccttccgggacccggggcgctgggagcctcacgtcctcgtcctccacgtcctcatcctccgggacctggggcactgggagcccgtgctgacctctgacctgttctgacctgtcttcttcttgtgcagacgggggacgtgtgtatctccatcctccacccgccggtggacgacccccagagcggggagctgccctcagagaggtggaaccccacgcagaacgtcaggtaagccggcccaaccccctgtgtccacccagaacatcaggtaggccgggctccgtcccgtatccacccagaccatcaggtaggccgggctcccccacaggctgtggcgccaaggcctgattcgggacctgccagctggcggtcctgggcctcgctgtacctgcacggtaggtgctttcacggggcctgcggcaccgtgtgtcggtgcagactcccaccaggaccccaggccggccccaccgtctggaaccacctagaggtgtcccgccatcctcagtcctggggccttctccttacccagccgtctctgggttggtcacctcgtgccacgtgtgccgcctgggcctcgtccccaggtacaagcactgggccgtgttgcccgtgtgtcctggagtgtagtctaggcaggacgtgcgggtgtgagggcagccccgggtctgacggaggggtctgcaccttgctgccctccctggtcttggcgtgggagggaggagactgatgcaggtccagcccctgctgttctgggggcctgagacagaagcagaggccatgaggccaggtgaaggtcacctgctgggtgggtccaggcgtccccgtgaccctcagggccagagaagagccggaaggctggggtgccccgggccgccccactccgacccactctccccacaggaccattctcctgagtgtgatctccctcctgaacgagcccaacaccttctcgcccgcaaacgtggacgcctccgtgatgtacaggaagtggaaagagagcaaggggaaggatcgggagtacacagacatcatccggtgagggcgggcgggggcgtcacgggaggagagactcagatccggcctgcaccccggcccctggtcccacggccgcccagccccaccttcctggtgagggtggcggagcttcctggtgcccatttacagggtgccagtcacagatggaggccgggccgagtggcggagggtccagccaggttcaagcccagcttcttgccccttttcctctttttttttgtttgagacagagtctctctctgtcacccaggctggagtgcagtggcgcgatctcggctcactgcaagctccgcctcccgggttcacgccattctcctgcctc[176 bp omitted]ccggcctttttttttttttttttttttggagacagagttatactctcttgcctaggctgcagtgcagtggtgcgatctcggctcactgcagcctccactactcgggttggagcagttctcccccttcatcctgccaagcagctgggattacaggtgcccactaccacgccgagctaatttttgtaatttttagtaga[137 bp omitted]tcttccaggcttttcagtttaacgcatgtctgtgctttaatgaagaaatggggtcgtgctgtgtgtgcccagtgactgactgttagggaacatgtgtctgtgccttaatgaagaaatggggtcgtgctgtgtgtgcccagtgactgactgttagggaacatgtgtctgtgctttaatgaaaaaatggggtcgtgctgtgtgtgcccagtgactgactgttagtcaggggtgttggccttactcatgtctggagtgcgtccctgcaggctcttggcctggtgagctctgggtacagctgtgcagtcgcctaccggcgccttctgtacctgcagtccacttagcttgcgtggctgtgtgtggtgacccacggctctccctctcctcccatcgccctcatgccccagagctgagccccacagccccttctcttgggtgcctgtgttcacatgaatgtgtaaacacgtgcgtgtctgtgtacaaagacaaggctttctttacgggttgacggccttaatggttcctgctcttcctgttacatagaggcccttcctatccattttttttttttctcagagtgatattgcatagatttcctcacagaggcctcacctatttttgttggtattttgtataaacagaatcttaaaaacaacttttaaaatattgcacacataatgcatgtgtcttcctcgccccaggacccaggagcatccagggcaccttccatcctgcactcgctggtacctggtgtcgtggggtcatctcggggcagcatcctggtgctgggcggtctcggctctgagcagccatggtgggcgggccccgtgcggcctcctgggaagtggcctgcaagcacctgctggcctctggaggtcacagggtagctgccctggccgtccctctggtgcagatgtcctcggtggccccggtccggtcgtgtcacctggcccaggtggctggctccttggcccggttcttcccggccacctccctgaggcaccacctccttgagatcccagcacagaaataaaagccacactatttttatccctcaaaactccctgtgggccaacacacatgtgccatgtggactctgctgtggtcgccgtttctgcctgttttttcatctgtgtgcgtgttggcctcgtggcagcccaagtcccgctgagctgtgtcgggcaggctgccgtggagcccggcttggtcagggatgttggtcttgctgaacaggacctccagaccgtcctccagctcatgctggcggtgtgccggcggcacctccacggtgcaggtcagttcccaccctggccctcccctgcgtctccccacagccgccacctctgcggtgccgtccccggggcaccgtcacccccccagcccgtccaccctggccctcccctgcgtctccccactgctgccacccgtgcagtgccgtccccggggcactgtcagtcacccccccagcccatcggagagcttggaaagcaaagcttggcgtccgctgggtcccgccacccagggacgtccctgaggccagacgcctgccctccacgcgtcatgcatccccataaaaagcactgggcttgtgggctgggcttggggctgtctgtctgctccctggtgccctcccatgcgggcactgtgggacccgcacaccctggtagcagccagccccagagcccagagccgtgcctggtcggtgataggggctcgagcccattgcctgcggctgcagcctcgttcctgttttctgtcaaatggggtcagcgtgccgcctggccctgctgtgccacccccggaagcccctttgcttccagtcctggggggacattcttgacgcgtgtcctggaggtggagccgggggcaggttcctcgtaggtcctggtgtgcgcggtgcagcccctcatagggccgggtgtacacggtgccctccaggaagtttgagctaacttgtcctcccttcctgccagaggctgggatggccaggccccccaggtttagaatccggaggccggggtggccaggcccccaggtttagaatccggaggccggggtggccaggccccccacgtttagaatccggaggccggggtggccaggccccccaggtttagaatccggaggccggggtggccaggccccccacgtttagaatccggaggccggggtggccaggccccccgggtttagaatccggaggccggggtggccaggccccccgggtttagaatccggaggccggggtggccaggccccccgggtttagaatccggaggccggggtggccaggccccccggtttagaatccggaggccggggtggccaggccccccgggtttagaatccggaggccggggtggccaggccccccgggtttagaatccggaggccggggtggccaggccccccgggtttagaatccggaggccggggtggccaggccccccgggtttagaatccggaggccggggtggccaggccccccgggtttagaatccggaggccggggtggccaggccccccgggtttagaatccggaggccggggtggccaggccccccgggtttagaatccggaggccggggtggccaggccccccgggtttagaatccggaggccggggtggccaggccccccgggtttagaatccggaggccggggtggccaggccccccgggtttagaatccggaggccggggtggccaggccccccacgtttagaatccggaggccggggtggccaggcccccgggtttagaatccggaggctgggatggccaggcccccgggtttagaatccagaggctgggatggccaggccccccggtttagaatccggaggccggggtggccaggcccccgggtttagaatcctgctgaggccacggagaggctcaggccgtttttgcgtttcccatctcacctgtgctggttcccgtctccagggatggtcctgcctcctgtccttgggccctcccagctgcttcctttgctcctgcgctgaggaaggcttttgccccccagtggggcagcatgggccctccctgttgccggcatcgttattttctcccagctcctgatgggtcccttgggttgtgcttcggggcggggcaggcgggtgtgactgcactgcgcccgtccagcctcccacccgcacctcctgcccttcccgagccccctcctctgtcatttctccccctggagttcctcacgcacagggctttgtcctaagtggtcgccacacgccgttttaagagaaacctgagcgttggggtgagcgtcggacctgggggaggggggccgggcaggggccgagtccaggcacgtgggtggcgccctcacccaccctgtccccccaggaagcaggtcctggggaccaaggtggacgcggagcgtgacggcgtgaaggtgcccaccacgctggccgagtactgcgtgaagaccaaggcgccggcgcccgacgagggctcagacctcttctacgacgactactacgaggacggcgaggtggaggaggaggccgacagctgcttcggggacgatgaggatgactctggcacggaggagtcctgacaccaccagaataaacttgccgagtttacctcactagggccggacccgtggctccttagacgacagactacctcacggaggttttgtgctggtccccgtctcctctggttgtttcgttttggctttttctccctccccatgtctgttctgggttttcacgtgcttcagagaagaggggctgccccaccgccactcacgtcactcggggctcggtggacgggcccagggtgggagcggccggcccacctgtcccctcgggaggggagctgagcccgacttctaccggggtcccccagcttccggactggccgcaccccggaggagccacgggggcgctgctgggaacgtgggcggggggccgtttcctgacactaccagcctgggaggcccaggtgtagcggtccgaggggcccggtcctgcctgtcagctccaggtcctggagccacgtccagcacagagtggacggattcaccgtggccgactcttttccctgctttggtttgtttgaaatctaaataaaactactttatgagaggccagagaagctgtgcttgggagggagaggcagcctccacgtccatgagtgactgcacacggccagtcccactgggaccctggctacgccaggtgtggatctgggaggcctgtcctgggaggcacggggagcagccgggtcccgcggcctgtacgttcccatgacttgggtcagacaggcctgggcagcatcccccagcctgcgggacaggggcggccagaaagcccccagagttcctcctccctgtgaccaggtgcatctagtgggacgggagctgcctctgcaggcatccagcaaagcttcgtcgcgggtccacagccgcctgggcgttgatctcagcgtctcagggctcccaggaccacagatgcccccgatcagcactccggcggctccagctccgtccaggcacaccctcggggtggggagccgtggccctgggcacacagggcaggcacctcacgtcctggtgtcaggaagtccccagcatcgttttattacatgtcatggaggaaagctcggagctcccatgccctcccggggcaccgccttccaggaacctgcctgcgttccgcttctgggcacccggaaagtcgctcagtggctgattcagggtcgaggagctgtgaggatgaggtttcccaccaagttgggacagaaaatggggccctggggtctcagcaaaccatggccctcgggaccaaacctggcgtccgcccctattgtgagtgaagtgttactggcacagccacacccaggtctcaggatcatccatagctgcttggtttggtttggttttgtttttgagacacagtcttgtgttgcccaggctggagtgcagtggtgcgatctcgcctcctgggttcaagtgattctcctgcctcagcctcctgagtagctgggactacaggctcccaccaccatgcccagctgatttttgtatttttagtagagatgggg[143 bp omitted]cacccaggctgaagagcagtggtgcaattacggctcactgcagccccaacctgggctcaagcgatcctcctgccccagtctctcaaagtgctgggattacaggtgtgagccaccgccttcggccagtgtctttattcatgaagaccaaaaactagaacagcgcaaatatccgtccgctggtgaatgcataaacacagcgtggtccagccacacaatgggatgtgacacagccacaaaaaggagcgaggctctgacacaggccacagcctggatgcaccttgaggacgtcatgctgggagagacgccaacgcaacaggtcctgtgtgattccactcctgggaggtccctagagaccaattcagaggcaggaagtagtggccgggcgcggtggctcatgcctgtaatcccagcactgggaggccgaggtgggtggatcacctgaggtcgggagtttgagaccagcctggtcaacatggtgaaacctcgtctctactaagaatacgaaaattagccgggcgtggtggtgggcacctgtagtcccactactcgggaggctgaggccggagta[131 bp omitted]gatggtagtgtggcttcatctcgagtcctctttgagaaacactttctaaaatgctcaaggatggagggtggagggtgtgcagcggtgggcggggctgtgaccgtcacctcacctcccccacaggaagcgcgtgtggggaggctcggggccggggccagcacccacactgggtctccacagcggcatggaggcctgcgtgtcttcactgctggtgctggccctgggggccctgtcagtaggtgagtgggagccgggatgcaggggggacactgaggcccagcgctctcggtgggtccctggatgggaggggtgggcgcgggcgccgacatcctgggtgtaagagcggagattcatccttgtttggagggggactgaggcctggggcatcccgagctcctcacgcttcaccccgagtggacatcccgggaccgtgggagagtgtggtgtccaccggctcacctcgcccatcctcccggcagcagccagaaggcaggggtcacgctcacacccgaggtgcagagtaggagactgagacttggcgaaggagatgctgacctaggactgcccagctgggagggcagagctgggactcgatccccgctggctgcctgccaccaccaagggcttggctgggactaggtgcccagcagtgagggagaagggaggtgggtggcggctcccctgcattccagctggactgagtgacaggggctcttgatgagttggggacccaagaagatggacagaggtaggaatccagccgtcagtcatcatcatccttcctcccatttttatttccttccacccatgggtccatcatccctccctccctccctccctccctccctcatctccccttccttccctctacccgtccgtccacccatcattcctccttccattcttccacccacccatccatcatccatccctctacccatgggtccatcatccatccctccctccctcctttcgttcccccttccttccctccgccagtccatccacccatcattcctccttcctcccattcttccacccacccgtccatccatcatccatccctcctttcaacctccctccttccctccacccgtcatccttccctccctccttccatgtatccacccatccatccatcatgcctctctcttcctttcccccctccttccctcctccctcccatccatccatcatccattcctccttccatccctccttcctttctcccgtgcttctgtgtatccatccgtatttgcagggctcgtgctgttctaggcctgccctcctgtctgactggaagagacaggccaggcatgagactgtgcagagcggaggaaacacggagggcaagagggcgggtggggggccgttgcaggagacgagcataaaccaagggaggaagccggtgggggaaaggtacgcaggcagctaagtgagacagacaaaggcccagggtgcaggcagcttgcaggcacagctagacttgcactcttgtcacccaggctggagtgcgatggtgccatctcggctcactgcagcctccgcctcctggtttcaagcgattctcctgcctcagcctcccgagtagctgggattacaggcgcctgccaccatgccgggctaattttgtatttttagtagagacagggtttccccgtgttggtcaggctggtctcaaactcccaacctcaggtgatccgcctgcctcggcctcccaaagcgctgggattacaggcgtgagccaccgcgcccggcctattttttttttttaagatggagttctgctattcttgcccaggctggagtgcaatggcacgatctcggctcaccacaacctctgcctcccgggttcaagcgattctcctgtctc[227 bp omitted]caggctgatctccaactcctgacctcaggctgtctgcccaccttgacctcccaaagtgctgggattataggcgtgagccactgcaccggcccgcaagcggggacttgattttcaaagcatgatggggattcagagaagattttgagctgatttacgttacattatgaaatcaatccttttatatttatgattgatttaaaataatttttgtacagctttattaggaaattatgcactatacaatttacttatttaaagactacatttcttgctgggcacagtggctcacgcctgtcatcccagcactttgggaggccaaggagggtggatcacctgaggttaggtgtttgaggccagcctggccaacacggcgaaaccctgtcgctactaaaaatacaaaaaaattagccggacgtggtgatgcgcttctgtaatcccagctactcgggaggctgaggcaggagaatcgcttgaacccaggaggcagaggttgcagtgagctgagatcacggcactgcattccaggctgggtaacagagtgagactccatctcaaaaaaaaaaaaaaaatggccaggtgcagtggctcatacctgtaatcccagcactttgggaggctgagatgggtggatcacaaggtcaggagttcgagaccagcctggctaacatggtgaaaccccatctgtactaaaaatacaaaaattatccaggcgtggtggcaggtgcctgtagtcccagctactcgggagactgagtcaggagaatggcatgaacccaggaggcggagcttgcagtgagccgagatcgtgccattgcactccagcctgggtgacagagcgagactctgtctcaaaaaaaaagaaaaaaaaagttttttttaagagactgggtcttgctgtgtcgcccaggctggtctcgaactcctggcctcaagtgatcctccctcctcagcctcccgaagtgctgggatcacaggggtgagccacccacatccggcctgatgtgcgttttgaaggactcctgtggctgtggggcccagtggggcctggggaggtcctggagaggggattgggaggtggcctggggggaacatgatgggggtgatgagagggggatgggagggatgaagggcagcccacacgtatcagcctaaaagtttcggggaacactggggacttcattaggatggcacatctgcttggggtcctgggcctctgagctgggcaaggacagtcgcagcaggcagcaggggcatgtagccccaacctggctctttgtcccccatcctggcaggcagctcctttgggacccagatcatcgggggccgggaggtgatcccccactcgcgcccgtacatggcctcactgcagagaaatggctcccacctgtgcgggggtgtcctggtgcacccaaagtgggtgctgacggctgcccactgcctggcccagcggtgagtaccctgccctgcccaccccaggggtccggggaatccatccgacggcgcccattctctgcagggggtgggctctgggagatttaggcccattgtgggacccccgtcccctcccggtgacgacttaggcaggtttaagtgacctgcggctgtgggactcctggagaaggtttactccttgcaagaggcactggcagggccagctccttccacaccgcagcctgggtcagagcctggctcctttcacggctgagccacagtcctggtgtggacagagtgcattgtgtctgtccattcacctgctgatggacccaacttaggcgggggcttctgctataaggaaggagggtcaggtgggggtgtttgccacctgtggccaggaggtcgaagccggccttcgagagtggctcgggaatcgacctggttcccggggatcaggaagccgctaaatgacccatcatggagttgccctacctcaggactggtccgtcatacagagcccagatcaagatggtcaaagtaacaaaaagggatctgccggcttgtgtaactgcaaagtctaggaggaggcctggcttcaggtgcggcttgatccaggtgctcacaggaggcgctgtggagcccatctgtctcccagctctgctgcactaccaggaagcctgtctcacaaggtggaaagattgaccctcctcagtcccatggaaagagggcttggctctctaaagttggggcacacttaggaggattggcatgtgtcaacccctgtacaaatcactgtggttgagcctggggccccaagtgaagggaattcccagggctggttttcgtgaagctgtaggcttggggttggatttttggacacacagcccttgcctggggccagggccgggcagaagtctggggcaggggtgagagcagggagggcttcctggaggaggtgggttgcaaagacacagggaaggactggccaagccaaggcctgtgaggggcagcggctgtgagtgatggccatggacaacgggcacagtgggggccgggactgcatgtggcgggtcgtccacgccgggccaggccgcagcaccctgattccctctgtccccaggatggcccagctgaggctggtgctggggctccacaccctggacagccccggtctcaccttccacatcaaggcagccatccagcaccctcgctacaagcccgtccctgccctggagaacgacctcgcgctgcttcaggtgtgcagggacgggacagggagaactgggcaccctcctgtcccccacgggtgcccctcacccccactgcgccctccccccgctgccgaccctccccccgcactgctgcccctccccccgcactactgccccctcccccattgcccaccctccccccactgccacccctccccccgctgccgccccccgcccccgcactctcaccccctccccctgctcacctgccccttcctgtcactcgtagctggacgggaaagtgaagcccagccggaccatccggccgttggccctgcccagtaagcgccaggtggtggcagcagggactcggtgcagcatggccggctgggggctgacccaccagggcgggcgcctgtcccgggtgctgcgggagctggacctccaagtgctggacacccgcatgtgtaacaacagccgcttctggaacggcagcctctcccccagcatggtctgcctggcggccgactccaaggaccaggctccctgcaaggtgaggggcgcccgggtggggctgggggaatgaggctggcgggagggccggggccagggcagccgccgggcaggttcctggctctcccgttctctggggagtcctgtcaggggctggggggcggggaagcactggcaggggtcccgtttctcaggtgcagaaactgaggctcagacaggtttagcaacctgcgcaagaccacacagccgggaagcggcagagctgtgacttctgctccagccaagacggtccggcgggggaagaaggagcagggttcacagggccagcgggagatggggaggggacacgcgtgggccgggagcagcccctgtgtctccttgagcctggggataacaggcctggccctgctcccctcggcgggccctgctcccctcgtcccctcagcaggtgcagaggctgagctgcggtgtgtcgtccctgcagggtgactcgggcgggcccctggtgtgtggcaaaggccgggtgttggccagagtcctgtccttcagctccagggtctgcactgacatcttcaagcctcccgtggccaccgctgtggcgccttacgtgtcctggatcaggaaggtcaccggccgatcggcctgatgccctggggtgatggggaccccctcgctgtctccacaggacccttcccctccaggggtgcagtggggtgggtgaggacgggtgggagggacagggagggaccaataaatcataatgaagaaacgctcagagcccgcctgagtcccagcccacctctgtccatgctggctgtggggcttccgacaaacctgtttccctcagcctcccgagtaactgggtctacaggcgcccgccaccacgccaggctaacttttggtatttttagtagagaaggggttt[144 bp omitted]tcccaggagggggcggcgttggccaggactggagcggtggccgggtctgcaggctggcaggggtgggcggccgtcctccccgcgtggctcctggggctgggccttgaacagcatcccaggatcttcttttttagtaacagcttttatcaagttacaactcacatagcagatgagtctccctgtaaactgcgattcaggggcctttggtacctgcacagagctgggcaaccaccaccgtgacatgtcaccccagcaccccgaaaacaggcccgtccccagtcaccccagcaccccgaaaacaggcccgtccccagtcaccccagcaccccgaaaacaggcccgtccccagtcaccccagcaccccgaaaacaggcccgtccccagtcaccccagcaccccgaaaacaggcctgtcccctgtcaccccagcaccctgaaaacagtcctgtcaccccagcaccccgaaaacagccctgtccccactgtcaccccagcaccccgaaaacaggcctgtccccactgtcaccccagcaccccgaaaacaggcccgtccccactgtcaccccagcaccccgaaaacaggcctgtcaccccagcaccccgaaaacaggcctgtccccctgtcaccccagcaccccgaaaacaggcctgtccccactgtcaccccagcaccccgaaaacagccctgtccccactgtcaccccagcaccccgaaaacaggcccgtccccactgtcatcccagcagcccgaaaacaggcctgtccccactgtcaccccagcagcccgaaaacaggccccatctctatcaccccagcaccccaaaaggaagccccacccccattgtcattccagcaccccgaaaatagactctgtccccactgtcaccccagcaccccaaaaggaggctcgtccccatcggccgtcactccccgtccccaccccagccccggtgccctcacatcccctccctgtctctggatgggcctgtgctgacatttcatggacaggggatcacgctgcgtggccttctgtgtctggcgtctcccgctgagcgtgacgtcctcaagctgcacccgcgcgctggctgggtccgagccgtgctcctgctccggggggtcgagctccagctcgaggggggcctcgctgcgtttgtgggtgcgtccctgggtgcacatctgggcggcttcgtctgcgtccgtccgtctgaagctttgctgggagccgcctgtgtgcgttttcgtgtggacctacctgctccttcctccctccagattagacccgtgggagtggcatctcgggctgttcagtgactctgtttcagcgccgcgctgttttcctgcagaatcttttaatttcactaccaactctttctttcttttcttttctttcttccctttcttccccttcttctctttccctcccttccccttcttctctttccctcccttccccttctctcccctcccctcccctcctctctctttctttctttcctttctttcctttcttccccgtctccccttcccctcccctcccctctcctcccctcccctctcctcccctcctctctttctttctttctttctttcttttcttttctttttttcttttattttcctttcttttcttctgatggagtctcagtgcgtcacccgggctggagtgcagtggcacgatctcggctcactgcaagccatctcaggttcaagcgatgcttgtgtctcagccacctgagtagctgagggatcacagacgtgcaccaccacgcccagctaactttttttgtatttttagtagagactaatagaaacacaggtttcaccacgttgaccaggctggtcttgaactcctgacctcaggtgacccgcccacctcgccctcccaaagtgctgggattacaggcatgagccactgtgcccacgttaatggttttttattattttattttatttttagacagttcccactctgttgcccaggctggagtgcagcctcagcctcccaagtagctggaatcataggggtccaccaccaagcccagctaatttttttggatttttactagagacggggtttcaccatattggtcaggctggtctcgaactcctgacctcaaataatccacccgcctcggcttcccaaagtgctgggattacaggtatgagccactgtgcccggccgggttagtgttgtaatagacttaatttttaaaaccatttttggtctgcaggagatgtgtggcggctgtatccacagggtcccccgcgtccccgcccccaggctcctggccgctcccctctccagtcagcaggagtcacggctgacgaactcacatgaatgcgtgattaactactaaggacctactcttggctcggatttcctcagtttcccctaatgtctcttcctgcacagggtcccacccgggaccgaacctgccgtttcgccgcagcctctcctcggcacccccaggctccgaccgtttctcagaactccgtgtctggaggccggctggacgggatttatgtagattacgggtgtggaccactgcacccgccagctatctcatgtttttctctcgattggactggagtcacagtgtttttgggagaggcaagtgcatttttaatctttaacttttttaatttttttatgttatttttttagagactcctgggctccagcaatcctcccacctcagcctcctaaaggattacaggtgtgagccaccgcgcccggcctaatctttaactttttatggcatcattggcagtggaaggttctcaggtcacaagtgaagagcctcataactcacaaaccaggcacgcccctgttcccggcacctgggtccagacacaaccccctgccccgaagcccctccttagccaagtacccaagtccagtctcttttttttttttttgagattcgagtctcgctctgtcccccaggctggagtgcagtggtgcaatctcggctcactgcaagctccacctcctgggttcacgccattctcctgcctcagcctccccagtagctgggactacaggcgcccgccacca[175 bp omitted]ccctg[136 bp omitted]ctgcctc[134 bp omitted]gtctcccaaagtactgggatgacaggggtgaggcaccacgcccagcccctttgggtttttaaattgttcattcatggccaggcatggtggctcgcgccggtaatcccagcacatcgggaggctgaggcgggcggatcacgaggtcaggagttcaagatcggcctggccaacatggtgaaaccctgtctctacgaaaattacaaaaaaaattagctgggcatggtggtgggcacctataatcccagctacttgggaggctgaggcaggagaatcacttcaagccgggaaagggaggttgcagggagctgagatcacaccactgcactctagcctgggcgacaagagcgagactccgtctcagaaaaaaaaaaacaaaaaaaccataaataaaaaattttttaaaaaatgataaatgtttgcaactctagctatgttaatgtctgatcagcacacattgtatgtattgaaacgtcactatgtaccccatgaatatgtacaattattatgtgttctttttttttttgagacagagtattttgctcttgttgcccaggttggagtgcagtggcacgatctcggctcaccgcaacctccgcctcccagattcaagcgattcccctgcctcagcctcccgagtagctgggattacaggcacccgccaccacgcccggctactgtttgtatttttagtagagacggggtttcgccatgttggccacgctggtctcaagctcctgatgtcgtgatccgcccgcctcagcctcccaaggtgctgggattacaggcgtgagccaccgcgcccg[226 bp omitted]cctcttggcaatgaaagctgcccggggcagccctctccctcttcctggtgcaggtgtgttgccagcgtggatgtccttcgtggacgtgaacttattttacaaaagagcacttgtccagagctagtcctgagcctgcggtttctgggagtcaccagctcgaacgacgcaggacaagtacactttggggtggcacgtcctggtgctgttattttggggtggggtgtccttccgtggtacggctggaccacgttgcctctgtccactcactgccctcgagggatgggtgagctgtttccacctttggctgccgtgacctgggctgctgtgaacttcgcagacgtttgtgtttctttcccgcacggaaacttggacagaagctccttgtcacgtcccacagtcacacggcccctgcacgtgcttaaaagaagctgtggtgtttttttttttgttttttttttttttgttgttgttgtttgcttttttttttgagacggagtctctgtttccaggctggagtgcagtggcgcaatctcggctcactgcaacctcctcctcccgggttcaagtgattctcctgcctcagcctcccgagtaggtgagattacaggcacccaccaccacgcccggctaatttttgtattttcagtagagatggggtttcaccatgttggtcaggctggtctcgaactcctgacctcaggtgatccacccgcttcggcctcccaaagtgctgggatgacaggtgtaagccaccgtacccagcggaagctgcgattttccttattccttgacatcctcaagggagaccctgatgtagaggcagggaggctaggaaggaggaagcatccagcccagtggggtggacccgtcagaaatgctcagaggcggccgtgcatggtggctcacacctgtcatcccagcattttgggaggccgaggcgggcggatcacctgaggtcgggagttccagatcagcctggccaacacagagaaaccccgtctctactaaaaatacaatgttagccgggcgtggtggcgcatgcctgtaatcccagctactggggaggctgaggcaggagaatcgcttgaacccgggaggcggaggttgcagtgagccaagattgcgccactgcactccagcctgggcgacaagagcaaaaaactccatctcaaaaaaacaaacaaaaaaatgctcagaggcaagggttgagcttcctctccagcctcctccagaggtcacagggcaccgccccaccccacccaccccacccactgggtcctggggtgactccaactggacagagatcagtggaggccaggccaggctggtgtttggtgagctggagccacgccccggggagagagctaatctctgagcccggacgtgcctcatcagtggttccctcctgctgtgctgagatgtccccaccccagccccggtgagtgactggggacttagagacacagaaccagccaccagcaggaggctgacaccctgtgtgggacacgcagtgccctggaagcctccacccctccgtctgtgttttcgtggttttttttttttgagacagggtcacccaggctgcagcgcagtggtgcaatcctagctcactgcagcctcaaactgctgggctcaagcaatccccttccctcagcctcctgaggagatggggctacacgtgtgcaccaccacgcctggctaatgtttgtaattttgccgagatggggtctcagtatgttgcttaatggagtctcaaagtcctaggctcaagtgatcctcccgcctcgacctcccaaagcgctgggatgacaggtgtgagccactgcgccctgccagccctcgctggttcctcctggtgtaaaagggaacagccgagtgagcatctccgggtggccggtgggcagagctctggtctcaggtggtttaaactggacaggtgtcacccgggagcttgacagtgacgtgggaccacatgctgggtgacttaaacaacagaaggcagcccctccccgtcctggggcccggagtctgaggtcaaggtgtgggcaggcgccgctctctgagaggccccacggaggagtcctcctgccttctccagctccgggggcgccaggcgtccttggcttgtgtccacattgctgcagtctctgcctctgtccccgcagggacgtctccccatgtctcagtccaaatgtccctcttctgatgaggatgccagccattgcctcagggccacccttacaactttatcctaactacctctgccaaataaggccacattctgaggttctgggtgggcgtgagttttggggggcaccgttctccctgggaagacgcagacgcttgtcgtcccgtggtaaatgccagaaggcctcatctgatgcccacgtacgccctgaggtggggaagctgctgtcctcatccttgctgagcgtggggccccaggattctcaggcagctggatgagcctgtggagaggccggtgcccaggctcggtcccagaacaaagcgcagaggcacgatggtcgctgacaaagtgggggccccgggaccccaaacagaaaggtccacaaaggctgaggtcggggcaggggaatttgattcaagagacattttcagccatacggcccttctcgaatttttttttttgagacagtctcgctctgtcacccaggctggagtgcagtggcgcaatctcagctcactgcaacctctgcctcctgggttcaagcaattctcctgcctcagcctcccgagtagctgggactacaggcgcccgccaccacgcccactaattttatatttttagtagagacggagtttcaccatgttggccaggctggtctcaggtgatccacccgccttggcctcccaaagttctgggattacaggcatgagccactgtgcctggcctttttttctcttttttgagatggagtctctctctgttgcccaggctggagtgcagtggtgcagctgactgcaacctccgcctcccaggttcaagcgattctcctgcctcagccttccgagtatctaggattacaggcacgcaccaccgcacctggctaatttttgtatttttagtagagacggcgtttcac[142 bp omitted]tcacaa[138 bp omitted]aaccctgtctctactaaaaatacaaaaaattagccgggcgtggtggcgggcgcctgtagtcccagctactcgggaggctgaggcaggagaatggcgtgaacccgggaggcagaggttgcagtgaacagagatcacaccactgctctccagcc[145 bp omitted]accctgtctctactaaaaatacaaagaattagccaggcgtggtggcgggcgcctgtagtcccagctactcgggaggctgaggcaggagaatcgcttgaacccaggaggcggagcttgcagtgagccgagatcatccagcctgggtgacagagcgagactctgcctcaaaaaaaataaaataaaataaactctgaaatttaaattaactgggtatttttatttgctaaatgaggccctacagggggtggtcctgaagaccctctccttggcagataaaagaggactgggatcttcttgcttctggggccagaactgagcagagcaggctcgggggttttgggtcgggggcaagggggtccctggctctgcctgagggtcagggaaggctttccagggaagggaccaggaaacagggtgttgaaggcggccacaggctttattttgtaaacaaagaccaagttcccaggagaactgacctcaggccagattggggccttgccaggggagggctgcggagggggcaggaattgggccaggccctgtggttgtttacaaccctggaggggctttgaaggcagctggccctgctgggcctcatccgcgtctgtgtcctcgttctgcacgtagcttcagaccctccccctccaccccccgcccccatgaggactttccaagcctgtggccccccaggtgggagctctttggcaccggtggttctgaggctccaagtcccctgatccgaagccatccccgagagggggtctcccagagtgggaagcgggggtctcccagagtgaagccctcagccccgtccaggccctcggcccccagcatcttcccaccctggctgggcccagccttcgccctggatggggttttctgcccctgcccaccgtgtgctggcccctcggttacgcacatcaccctatttatttatttagagacggagttttgctcttgttcctcaggatggagtgcagtggtgcgatcttggctcactgcaacctccgtctcccaggttcaaaggattctcctgcctcagcctcttaagtagctgggactacaggagcccgccaccaggcccggctaattttgtatttttagtagagacggggtttctccatgttggtcaggctggtctcgaactcccagcctcaggtgatccgcccgcctcggcctccgaaagtgctgggatgacaggcgtgagtcaccgcgcctcatcccctcctcagccccccagcacccacacgtcccctccctgtctctgtggatgggcctgtcctggacatttcatagacatgggatcacacagtgtgtgtccttctgtgtctggcgtctctcactgagtgcgacttcctcaaggtgcatccgcgccgtgggctgcgtccgagcctcgctcctgttcacggctgagtcgtgtcccattgcgtggatgggccatgctg[236 bp omitted]cggcctcccaaaagcaaccattttatttgtataactgtgtccaaattgttagaaataagtgctgggtcccgcaaagagaaaccagcccttagaaacctatttcccagcgagacaactttactatacagaatggggctgccccggagctcacgggacgaaggaaggaaggagcttctgttcccccgctggctggggctggacgccctcatctaagctcatcccggttggctaagacttaaaactgtctccaaatcgggtaaaggcaagatttgcgagaagaggagggctagggggaagaagggggtagggttgattgacaacttatgacctggaagttgagttttgtaagaggaatttggttgtctcaacaatttac[140 bp omitted]ttctcctgcctcagcctcccgagtagctgggactacaggcgcccaccgctacgcc[181 bp omitted]gctctgttgcccaggctggagtgcagtggcgcaatctcggctcactgcaacctccgcctcctgggttcaagcgattctcatgtctcagcctcctgagtagctgggattacaggcacgtgccaccaaacccagcttatttttgtattttggtagagatggggttt[132 bp omitted]ttgttcttcttgatcgtctaggaacaagagcttatcggaatacagagcaggagaggtaggggaggtttttgtgagagctgcttctgtgagtctttgggttaacccgcgaatacaaaggtatgacacagcagcccacaggatgagtcctcctgtagcaattgcgagggaggtaaagattgaggtcagcccgggcgcggtggctcacgcctgtcatcccagcacttcgggaggccaaggcgggtggatcacaaggtcaggagtttgagaccagcctggccaacatggtgaaaccccgtctactaaaaatacaaaaaaattagccgggcgtggtggcaggtgcgtgtaatcccagctacttgggaggccgaggcgggagaatcacttgaacccaggaggcggaggttgcagtgagccaagatcatgccattgcactccagcctgggcgacagaacgagactgtgtctcaaaaaataaaaataaaaatgaagaaaagaacaaaaaaaagattgatgttatgagtcccttccattttccaaaccacctttccatcagtcccatcaaggggccatctattccagagtttatggctaattcatttgttaggtcggtaaggccctgtcaggctttcgagatggtcccatcagggcctgtattatctgggatcgaagtaacgatgcgctttatttatttatttatttttttgaaacggagtttcgctcttgtagcccaggctggagtgcaatggcgtgatcttggctcactgcaacctccgcctcccaggttcaagcaattctcctgcctc[135 bp omitted]gcctcccgaagtgctaggatgacaggcgtgagccaccacgcccggccggtttgtgactattttctctaactttacctaatgtttccctttaatatttctgccaccatcctgagcgaatttcaacagggaatggcaccccagggtaccggttactacaagggctgggccaaggattttcttcagaagaggctgtctttggctgtggatatctttacggggtatatgaaccagacaggcatcaaacgaaactagctggggaaagggtgatcaccttatattgataataagacgtccttgggcggctacagggagaaggaagagacagattaaacctttttgaatgttaatttggaaggcgttgatcctggagtgaaggtccaagatccctccagggatggggccctttccgaccgtcatcttggtggtcaggagcacccgataaagtccttcccaggttggctgagtttttcctctttccaacttctgacaaggaggtgatccccaggctggtgtcggtgaactgggaattcgaggggtggaggccttgggtccggagggaggaaagggtggaagacaaaccacacatatagtttttgagaaactgatcttttgtttcaaatgtaggaaggtcagtagtggaagtcagataaggtagcccatagagcatctcataagggaacagg[131 bp omitted]attctcctgcctc[219 bp omitted]tctgtgcgtggtaaccaggtttccaagattaattcggttaggtggtttttttagagtttgattcattctttctaccctccctgatgagggtggatgccagggaaatattcccatttcattcctagtgctggggttagccccgtaatgatgtgtgcagtgaagggggtccccttgtccgaatccacgttctctattagtgcaaacctgggtgtgacgtgttcccacaggcctctgactacattgctggctgttgcgctcgggaagggggtggcctctacccagtgggtgagatggttgactgttcccagtaaatgtttgaggtgggctattgggggcatttcagtgtagtcaacccaaacactttggaacggcctcaaccctgggtttcttccctgggaggttgcctcttttttttgagatggagtcttgttctgtcacccaggctggagtgcagtgggaccatctcggctcactgcaagctctgcctcctgggttgatgccattctcctac[226 bp omitted]tctttagggtttgcttattagcttttctgcacacgatgcaaccatccacatttgcctagcgagggtctctatcccacacacccacagactccaagggtctctatcccacacacccacagactccaagggtctctatcccacacacccacagactccgagggtctctatcccacacacccacagactccgagggtctctatccccacacacccacagactccgagggtctctatccccacacacccacagactccgagggtctctatcccacacacccacagactccgagggtctctatccccacacacccacagactccgagggtctctatcccacacacccacagactccgagggtctctatccccacacacccacagactccgagggtctctatcccacacacccacagactccgagggtctctatcccacacacccacagactccgagggtctctatcccacacacccacagactccgagggtctctatcccacacacccacagactccgagggtctctatcccacacacccacagactccgagggcatatatcccacacacccacagactccgagggtctctatccccacacacccacagactccgagggtctctatcccacacacccacagactccgagggtctctatcccacacacccacagactctgagggcatatatcccacacacccacagactccgagggtctctatccccacacacccacagactccgagggtctctatcccacacacccacagactccgagggcctctatcccacacacccacagactccgagggcatatatcccacacacccacagactccgagggtctctatcccacacacccacagactccgagggtctctatcccacacacccacagactccgagggtctctatcccacacacccacagactccgagggtctctatcccacacacccacagactccgagggtctctatcgcacacacccacagactccgagggtctctatccccacacacccacagactccgagggtctctatcccacacacccacagactccgagggtctctatcccacacacccacagactccgagggtctctatcccacacacccacagactccgagggtctctatcccacacacccacagactccgagggtctctatccccacacacccacagactccgagggtctctatcgcacacacccacagacttcgagggtctctatcccacacacccacagactccgagggtctctatcccacacacccacagactccgagggtctctatcccacacacccacagactccgagggtctctatccccacacacccacagactccgagggtctctatcgcacacacccacagacttcgagggtctctatcccacacacccacagactccgagggtctctatccccacacacccacagactccgagggtctctatcccacacacccacagactccgagggtctctatcccacacacccacagactccgagggtctctatccccacacacccacagactccgagggtctctatccccacacacccacagactccgagggtctctatcccacacacccacagactccgagggtctctatcccacacacccacagactccgagggtctatatcccacacacccacagactccgagggtctctatccccacacacccacagactccgaggctgcattgcacgtagcttggggacccgagtgagctccttgatgaagctctgacagtatttccctcatgaggggtttagacagcatttcccttcaatcctacttgaagggaaatccctacagagggaaagtggtacctactttccctct[143 bp omitted]agcctcccgagtagctgggactacaggcacccgccaccacacccagctgatttttgtacttttagtagagacggggttt[272 bp omitted]cctgtctctactaaaaatacaaaaaattagccgggtgtggtggtgggcacctgtagtcccagctactcagagaggctgaggcaggagaatggcgtgaacccgggaggcggagcttgcagtgagccgagatcgcgccaccgcactccagcctgggcgacagagtgagaatccgtctcaaaaaaaaaaaaaaaaagactgagcgtggaacaaagggcttgactttgaagcgtgcagcggcgtgaaacttgcagtgcgggaaagtgaatttacagacgcaggacagaggcagttaatcgtacagtgacaggtttcgtaacctcagccgagcttgtgagcttgcggccgcattgagaaagaacaggagcttacaaaactggcagagtattttacggggagcgggaaacggaaggaggagtctggttcttatctttgcacggggggagtgcagtgctgggaggcgtctgggcggcattccttggggttctggctttttaaatggtgttttcaaggccttgcctgggggctttgcctgttgctggctttggggcgagtcagctttatacgaaaaaggtattttccgtttcttcaatttccgctttattccctccttgatgctttttataaataaggtttaatagaaagcatcactattttttatttacttctacagggggaagtagctcttttcctggcaggggtggacacgtagttatgggatgagctcggtggtactcggcctgtccacacgagcgtctctggctttgtcgatattcttgacaaggaggggaagagacaagagtacgaggcggactcccagtatggccagaactactcctagtaaggttttaaatcccccgagggatgaaaaccaaccacgggggggcggggggaacctggagaccattccggtttccaggtttgtgttggaacatgagctaagtctcgcattctcgcaattaattcatgacgtcctcctcattgtcatcgatttttaggcaacaattagttaaattaaactctccgcatatccctccttctgacatagatctagcgagagcagcaagaacaaagggaagagtagcatgtttgtacctaggatggacaagagatgtttgcccagaggagggggttgagcaaagcgacaggttaatagtaaaacaattaagatgacaaggaaaattactgggcttaagatttctaactacatttacttccttgacgaagcttcggccgtgcgtagactggtcagcttccggggtgactagagcagggctgtggtcactttcactggcatctgggtcctgtcgtaggatcagccggtttggatggtctgggtcttgctggctggtccacttgtcctgggctgctggtttcagccgactgtggagatcgaaggcacagttcctgaaacattaacagcagtgggagtggacaggatcgcagtctaggcccatcccatctgggtcccaaagtggttggattctatttctttttttttttttttgagacgaagtatcactcttgtcccccaggctagagtgcagtggcgcgatctccggtcactgcaacgtccgcctcccgagttcaagcgattctcctgcctcagcctcctgaatagctgggatgacaggggcacaccaccacgccccgctaattttgtatttttagtagagacagggtt[138 bp omitted]aaactaagcttttttgtttggagaataacgtgggacctctgggaggggaggctccgggaggagaggcacagccagggcttcctctttagaatgtggtgtccttattactgcccgttttgcctcctcgtctgcctttgtttcctttggcctccagtgttcctgccttttgtgcaccctgcaacgcagaacagctacgtctttggggcccacacggcatcctggagctgtaaaatttctttttttttttttttttttcatatggagtttctctcttgttgcccaggctggagtgcaatggcacgatctcggctcaccgcaacctccgcctcccaggttcaagcgattctcctgcctcagcctccctagtagctgggattataggcacctgccaccgcgcccggctaattctgtatttttagtagagatggggtttctccatgttggtcaggctggtctccaactcctgacctcaggtgatccgcctgccttagcctcccaaagtgctgggattacaggcctgagccaccacgcccggcctaggagctgtaaaatttcttctttgtattttatttctttgcccccagcagttaaaagttctctttcttggctgggcgtggtggctcatgcctgtaatcccatcactttgggaggtggaggcaggcggatcacttgaggtcaggagttcaagaccagcctggccaacaaggtgaaaccccgtctctactaaaagtacaaaaattagccaggcgtggtggcgcgtgcctgtagtcccagctactcaggaggctgaggcaggacaatcgcttgaacctggcaggtggaggttgcagtgagccgagatcgcaccactgcactccagcctgggcaaaagagtgagactccatctcaaaaaagaaaaaaaaagttcctctatgggatggtctttccaattttcttttttctttctttcttttttttttgagacggagtctcgctctgtcgcccaggctggagcgcagtggtgcgatctcggctcactgcaagctccgcctcctgggttgaggccattctcctgcctcaggctcccgagtagctgggactacaggcgcccccaccacgcccggctaatttttttgtattttagtagagatggggtttcaccg[241 bp omitted]tgaaaccctgtctccactaaaatacaaaaaattagccaggcgtggtggcgggcgcctgtaatcccagctacttgggaggctgaggcaggagaatc[135 bp omitted]ctcgggaagtattttgggtttgcagatctgattcccgaatccttgtaattatcccatctccgagatcgctcatgttttttaggtcacattgtcatcccacccaggatcttgggccaggaatttacgctccgctgaaaggacgttctgaccggggggtgttcacgctcccagactaacacagcggcctgtgaatcatggttctctctctcctgagacgagagtactgagggtagacattaattcagcccaagcgtacagctgtggccccagaaattggtcaatttgatccgcgaatccaaaagggtcatctaacagtggtttgagttcttttagatttctaacctctgaactggttaaagggggcatttacgaagtcaatatcccttcctcccggtggtccttccctaaaggggaaaagggctgaggcaggtctttttgagcaggaggcaaaaggaaagttctgtgggtttttgtttgtttgtttgttttttgagacggagtctcgctcttgttgccgaggctggagtgcggtggcgcgatctcggctcactgcaagctccacctcccgggttcaagacattccctgcctcagcctcccgagtagctgagtagctggaattacaggcgcccgccaccacgtccggctaattttcgtatttttagtagaggcgaggtttcatcatcgtggccaggctgccagtcctgaactcctggcctcgtgatccacccgcctctgcctcccaaagtgctggaattacaggcgtgagccaccgcgcccggccgaaagtttcgaatatccctttggcattgttctgtttcccgttggagctttcctgaggaaggggcatgttctagtggctgtccagcggggatgtgggtggcaaggtccaggtggttctataggggagggatggaggggcggaggagcgggtgggggaggggcggaggggcgaggggtgggtgggaggggcggaggggcgggttggggaggggcggaggggtggggtgggtgggtggggggggcggaggggtgggttgggaggggcggagggggtgggttgggaggggcggagggggtgggttgggaggggcggagggggtgggttgggaggggcggagggggtgggttgggaggggcggaggggtgagtgggggaaggtggtctagaggatcccacccttctttagatatggggcgtctctgctaaaaatacaaaaattagccgggcgtggtggtgcgcgcctgtaatcccagctactcaggaggctgaggcaggagaatcgcttgaacccgggaggcggaggttgcagagagtcgagatcgcgccgctgcactccagcctgggtgacacagcgagactccaacacacacacacacaaaagatatggcgcgtctcattcattcacaagttcctcttcaaaggtttggctcgttcagcgccctcgttcttcgtttcctacttccaaggccaacctgacttcctcaccctctgggcctccccgtctgagtctcagtaaacaagtttcccgccggtcctgatctgcagagatggcacctgccacccactctgcacatccccctcccgtcgccacgggctcttcccgccagtgtagccacattcctgcccctttccagttagcccttcgcgttcggcttagtctgcggtcctcttgcattgcgactccgagtttaacttccaacacacactttcaacctccaagagacgcccccacctgtgtcgccccaatagcgacttttctcaccgtggtcgccgcggaacttcaagggtccttcctacccgcgttgctgagagtctgggtttacgcgtcacctcgggcgggacccgatcctccgctcctgaggcccccacaatgaagcagtcggacgcgtctccccaagaaaggtaaccgccagcctctcctgaaacagaatgggatccaaatgggatatttgggggcggcgagtcggtcccgcaaagagaaaccagcacttagaaaatttctcagcgagaccactttacttgtacggaagggggctgcctgcgtgggatgcaatctccagagcacacgggacaaaggaagggagcttctgttcctctgtcctttccctgttggctggggttggacgcccacaatctaagctgatcccggttggctaaaacttaaaacttttttaaaatagggtaaacgcgccacctgcgaggaaagaagaagggggtaaggttgattgacaactttagacctggaagttgagtttctgaagaggaacttacttgtcccaaccaaatggtgcacaggacgtttatactaagaaattattcattttctgagatccagattcaagtgccctttaagtatttttatttgggcggaggaggtcacttcctcccacctaatttattaatacgttcatatatatatatatatatgtacatttttaaaggcagagatgtgcgtctcgccatgttgccgcgtctggtctcgagctcccgggctcaagcgatcttcccgcctcgacctcccaaggctctgggagtacagacgtgagccacagcggccggcccgtgtttaactcagataaaatctgggtaacacactttcaacgcttcaaccccctcgggcgcaccgctctgcgctcattgcaactttgaaagcaggaaggaagaaatgcgcaggctccagccgcgtccccgcaggccccactcccgtttcctagcaacgccgggtcacgtgcgccgccgcccggattccgtagcgtgagcctgccggagccggcgcgtacatgcgagcgtgtgcgcgcgtgcgcaggcggggcgaccggcgtccccggcgctcgccccgcccccgagatgacgccgtgcgtgcgcgcgcccggtccgcgcctccgccgctttttatagcggccgcgggcggcggcggcagcggttggaggttgtaggaccggcgaggaataggaatcatggcggctgcgctgttcgtgctgctgggattcgcgctgctgggcacccacggagcctccggggctggtgaggagcgggtagggggcgggggtgcggtcctgcaggggccgggaatggaggccgcggtgccgacccgaagccgacgggagcctggggcctcggcgcggggcggcctggggtgcgaaaggccggccccgggggcttcccgcgccagcatggagcttgggggtgaagtcccagggtttgaggggggactagaggttcctcccggcgcggcctgccgggctcccccgggcgctccggcctcgagcccggcctctgtgtgtgggcgtgaagctccctgcttggaggcgggagccagggggtcctggccaggccggtcttggtcaggggaggtgggcgtcttgcttttcggtcacctggggttgggggtgacctgcttcctgggtgagggcgtctgcgaaggcggttggaggtggcccgcccgccggtcccatcggccaggagaagggagacccaaagcctgggtgagcgtcccctttggcctggagccaggggtcaggggctggttggtgcctgcccaacccgtcctgctggggctggactccgcaggacctggggaaagcggcctgggcgtggaatctggagacgggtccaccctgcctgcgagtgttagggtcagagaccctcccctgagactctctggggcccccgcaagggcccgtgcggcctggagcgatcatcttggcgctcccttctggaaaaggggcttttgtcctccaagagcacatggaggctctgagtgggtcagccctccggatcgggaagggattaccgttcttcacgggatttagccctggcgtcttgcctagggcgtgcacctgcccccgggtgttctcccagactcttaagacctcgcaggctccctcgaggggccctgcgtggaagggaaggcggaatctccctctgattctgcctggattcagcacccagaatgaggtggtctctgaacgcccctcctcctttacaggcgaggaaacagccctgtgggaagtcgaggttccaaggtcacagtgagggggccctggccacccgattcagcgcaggaaatagtgagaaagtcgtttttagccgactctgacccgcattcggtttccagtgctgtcttaggagggccgtgtgttgagggtgggcaaacgtggtttggagagcgcatttgggaaatggattgaggtgtgtttttccgggagaaaagcatgacatcctttcttgcttcatagaaaatttcttcctttgttgagacccccatttggttctgggttaaagatttatagtgaggccgggcgtggtggctcacacctgtaatcccagcactttgggaggctgaggcgggtggatcacctgaggtcaggagttcaagaccagcctggccaacatggtgaaaccccatctctactaaaaatacaaaaattagctgggcgtgttggcgcacgcctgtaatcccagccactcaggaagctgaggcaagagaatcgcttgaacctgggaggtgaaggttgcagtgagctgatatcatgccactgcactccagcctgg[222 bp omitted]gaggcaggagaatggtgtgaaccagggaggcggagcttgcagtgagccgagatcgcgccattgcactccagcctgggcgacagagcgagaccccgtctcaaaaaaaaacaaaaaaaaaatttattgtgaccgatgtgttgggaacaaggtgcagagctggagggtctggcctcctgaagggtcaagagcaagggcttcgagcctctgtcctgggcattgagccgtagggggccttgggcagaggctggggagggggctccttcttccagaggctttgccagctaactcctgacctacgtctgagatttcgtcttcctggtaaccaaagtggccctttatcgaatgtctcctgggcaagggcctggccccagcactgcggccagctctctggggagacacagataggagcccatgggtgaggtgagcgcggaagataagccgcccccgccagccctgtggaaacccagccaggcctgactgggtttcaagcacagcacgaggttcccacattgagctaatttggacagccaagtgggtgaaagacctttggtctctccctgctgggtagggtggttcacagttttgttccttttgtgcatttgtgcaggagactgagaagggtttcttctgagcagaaagcttagcctggggcttactggccagagctgcctgcagcctgggaagcaggtggagtctgcagtgctggcagcgccgccgtgcagcggtgtagccgtgtgtgcgcgtgtgtgtgtgtggtgagaaaccccacttttgctggggactgactcgtgaagaccacaaggtctgggcaacacagccttggcccgtgtggggtggacactgctgtttgctctgtgaattcgtgactgtgtttgcctctcctgaaacttgcttcaggggcgtctgcgggttggtggggcacagccgggtggggtgagtgcccaaggttggccgtccgcgtctcctgtgggcttgtcggggaccggagggccggggtgtgctagctgggtcccgagggtggagggcttcacccccgagcctcagatgagaggagtgggagtgcctggctgcggccggtgggggtgggtgggggaggtgcccgaggctgcttcccagagctgttctcgctggctgctgtctgagcactggggtgggtggggaggagggcgggtgggggcgggcagccttatcctgcggggctgcttgtgtacaagtaccacgcggcctgcctggccctgagccctgggcaaggaggcggaggctgtttttagatgaaggtgactttacttgagaacatgggttacgtctcatgtggccagaatcgaattctaacctttctggggctgtggccgagggtcaggcgccgtccctcctcctgctgctcatgggtggaggctcctggtgcggcgggcgagatggggtggtccgtggggtgggggcgctctgcattgtccccgaggagcctctatggaggctttctcttccggacgcccccccacccccagtgacacgtcaatacacagacaccagcatcatcagcatccggagggacacagggttgttccatccaaagccttttggtccctttgggagcgatgctgcccgctgagaagctggcggacccagcgggagcaccgggaccggtgcagatggcgcctgggagcccgggactcctggaaaggtggctgggggcagctcggctgcgggccccacctggtcctcctcactttcctgtgtgccctgccctgcctggaggtggggtgaggtgagtcaggggccagccctctcctagcacccctgggtgaggaggatgtggagcccagccctgcaggtctggaggatgaggagaggggctgctgcagggcaggaaggagcttgccagctgggcagcctctggctgtgcttcctgccctgactcacctcgcccagctctgcacatagctgccagtgttgcagtctgggaaatcttaactcccaagaaatg[222 bp omitted]ctgaggcaggagaattgcttgaacccgggaggcagaggttgcggtgagctgagattacaccactgctgaacagagtgagactctgtctcaaaaaaaaaaaaaagaagaagaggagaaagaaaatggcgctgccaaaacttgtcaactgcgcctgcccagagctcacctgaggtgctcagacgtgaacattcctgtccccgtggccttgggggccgtgacctgtgcactgccacgcagcctcggagccgtgtgcacgcatatgcacgtgtgtatgtgttgtgtgtgtttgcagacgtgtgtccttgtgtgtgtgtgtgtgttgtagcggtgcctggggagtctgacctcagaaggtgctgtggggagggctgcaaggtcctggcgggaggaggcactccccacgcttccccttgggctgggctgttcctggcaggcgagtgctaggcacagtgtgaggttctgtgtggattctgctgtgctccttggcagctctgggggccttcccttgcatttcgaaggaaggggaggcgtgtggctggaggtgagaggccctgaggccctgcctggctcccagcttcccaaatccgcctctctctgggtcgccgccctcagagattgctgaggacacgagctttccacccacgggctgtcctaacggagccgggctaggggcttctggacagaggccgcctgcccctttgggctttggggtttgtttttctcagcagctcacccgggtctctggggtcagggtatcgggcagaagtcagaggacggtgcgcttgggacctgagctctgggcagccctcggggctcaggactcctggctcttctgcccagtttcatgtgttttgtgttttgaaaccacgtgtggtcccacagttgtgccctcagaagccgccgtggctgccgtgaggtagcagtggacgggacgcccacggtctttcccatgccatgctgtttccagccgggccccatcactctcccacaagctgaaaggaagtggcttctccaccagccctggctgggagtcctgtgggcgaggccttccccaggagctgccctcccaagtgccccaggcactaacaagaccccacgcgtgctctccccacagccggcttcgtccaggcgccgctgtcccagcagaggtgggtggggggcagtgtggagctgcactgcgaggccgtgggcagcccggtgcccgagatccagtggtggtttgaagggcagggtcccaacgacacctgctcccagctctgggacggcgcccggctggaccgcgtccacatccacgccacctaccaccagcacgcggccagcaccatctccatcgacacgctcgtggaggaggacacgggcacttacgagtgccgggccagcaacgacccggatcgcaaccacctgacccgggcgcccagggtcaagtgggtccgcgcccaggcagtcgtgctagtcctggaacgtgagtggcgggcacctccctccccgcctccctcagtttccctcctgtgccgctcgcctcccggctcctgctcagtagaacccagacgcctcctcccctctccgtcccgctgtgccccgttgggcccaccgcctggacggaggggcccggacctgaagggggtgggctcgccgcctgaccaccagcgctgggcggcctggctcggggcaggcagggctctgccctccagcaggtgggtcctcgtcctcccctcgaccctcgtgccatccgttccgtcgtttctgcttccccgggcgcctgcccggctccctccctgagcgtccatactgcaagcctgaggggccctccaagctcagcccaggcttgcaggtctcagaaccttctgtgtccttcgcagcatctcgttctaagggattttcaaatttcaattcctagcgggaatattgtaaactaaccaagaaccaagagatttgcttggttggggattggcagaagaaccggggtgctcccagcactgctggagtgccgtcagcctggggctggggggatgtggggccacctgagtgcctcctagagaagggcacgggagccttggccgggggtgctgtggctattttttttttttttcctggagatggagtcttgctgttcccaggtggagtgtggtggcacaatctcggctcactgcaacttccgcctcccgggttcaagcgattcttctgcctcagcctcctgagtagctgggattacaggcatgagccaacatgcccagctaattttttgtatttttagaagagacggggtttcacc[135 bp omitted]tttccagtttgtgctggggctgctacaagagctcgatgccctggtccctgctcagggacgtgggtgggtgccttgtctgtccccacaccctggtcccagcctcgtgtgtctctgggcaggaacatcgccaggcggggcctctgggttcccagcgccttagcccagggcccgccagctgccagcgaagggtgccttcccgaagggggtgccttcccgaaggggcctcctcagcaggcgctgggctcttcccttcccggaggcgtggccagaagttccccttgggcctccggtcctcggggcgtaagggccacggtgtatttttgggatgaaaaccagtccttcccggggaggagccgcaggttcctgggggtcaggcaggcagcgcgggccgtgctcctccactctgctgaccgcgtctcgccgggccttgcagccggcacagtcttcactaccgtagaagaccttggctccaagatactcctcacctgctccttgaatgacagcgccacagaggtcacagggcaccgctggctgaaggggggcgtggtgctgaaggaggacgcgctgcccggccagaaaacggagttcaagtgagtgcctgaccacgccatgccgccacctgccccttctcacggctctcttgccgccagcggcctgtggtccgtgagaacaaaagaccggtcggcaggcttgatccaggcggaagttagggaccagctccgcgcagacccccagagggaaaccccagggaggggtctgaggggcgtccttgtgaggcagggggctccagcagccctggcaggagtccccattgcttgctcctcactaggtcccgggcacgaaagggcgccacactgccaggtcccgggcacgtgtgcgggcctcccaggctctgtgctcctggcacaagagggcaccacactgaggcatgccctgctcggaccccagacgctgtcatggccggagctttgtcataactggggctgggacggccctgggagcacagagccttttgttttcaggctgactgggaagacggtcacagggtgtggggtgcagagcagggaccagaggtgtggggttcatcagtcggggagaagggggtctgttggttctctcacctgtggggtcttgccagcctggctctgtccttggggccgcacggggaccccaggagttcttttgaggttcagacttgactgggacagttttgctttttcactgtgccgtggttgggcccctggagaaccctgggtccttggaggcgtcctgcagagctggtacgcggctcacctgcctgctgtggttgcagggtggactccgacgaccagtggggagagtactcctgcgtcttcctccccgagcccatgggcacggccaacatccagctccacggtgagtcctgcagccaggggtaccgggcaccaccgactgtcgggagaagttgttggcctgaggcacccggcacatcccagagccctggccccctgctccctggaggggaacagccctcctgcgggaggccggggatgggggcgggcctgcggttccaggctcctctctctcaccctcctgtcagggcctcccagagtgaaggctgtgaagtcgtcagaacacatcaacgagggggagacggccatgctggtctgcaagtcagagtccgtgccacctgtcactgactgggcctggtacaagatcactgactctgaggacaaggtgagaagccaaggaggctgggggtcctggacccagccctcaggactgggtgagaggcctagactgggggtcccggacccagccctcaggactgggtgaggggcctagactgggggtcccggacccagccctcaggactgggtgaggggcctagactgggggtcccggacccagccctccggactgggtgaggggcctagactgggggtcccggacccagccctccggactgggtgaggggcctagactgggggtcccggacccagccctctggactgcagccctccagactgggtgaggggcctagactgggggtcccggacccagccctcaggactgggtgaggggcctagactgggggtcccggacccagccctccggactgggtgaggggcctagactgggggtcccggactcagccctccggactgggtgaggggcctagactgggggtcccggactcagccctcaggactgggtgaggggcctagactgggggtcctggactcagcccttgcctttggtcccctaggccctcatgaacggctccgagagcaggttcttcgtgagttcctcgcagggccggtcagagctacacattgagaacctgaacatggaggccgaccccggccagtaccggtgcaacggcaccagctccaagggctccgaccaggccatcatcacgctccgcgtgcgcagccacctggccgccctctggcccttcctgggcatcgtggctgaggtgctggtgctggtcaccatcatcttcatctacgagaagcgccggaagcccgaggacgtcctggatggtgagccgtctgccctcctgcccacatgccctgctctcggggtggcccagggccactcctggtccgtccctgccagccccaccgctgacccagagcttggaactgaggagccccaggcagggagttgatgggaccccgaaagaaagtgtgggatggagggtctagccccgggcagctgcggctcagtgggcagcgggaccccgggaggaggaggcggcacctccgccccacagcctcacccggcccttccctcccgctcacttggctgcaagccagtgtcctccgtggtgagccggcccttgctgctctgcatgatcaggctcgggaacctgaggtcagccatgctgtgctccggcagcccctgcctgcctcctcgcggagcccttctgccccttgggctgcgtgtgccggggcgaggcctgtgtggggcctgtgatggcagctcctggaaaacgctgtggggcaggggtgaggcccacgaggccatggggacagctcaccatggggagcacacctgcaggtggggagggctgcctttccccacagcactcagaagatgcacgtggccggggctgatgagctgccccgagccacccctgggggtcactgagggcagggctggcagcacagatgcccctgctcggggcctgagtggggccagtgctgacaggctgtcctctcgtcctctttttcatggcggcggtccttcttcagatgacgacgccggctctgcacccctgtaagttccagctgtgggggtcgggggtcccaaggagcggcctgctgccccaggcctttaaaacacaaaggcagagcccctgggcttcagtattcgggggtcctgggggccggggtgggcaggggtgacttggagagagtgacttgcgggggacaccctctcacccggcccctcgtgccccaggaagagcagcgggcagcaccagaatgacaaaggcaagaacgtccgccagaggaactcttcctgaggcaggtgcggtgggcgggagctcctcctgagccaggtgtggtgggtgggtgggcgggaactcctgagccaggtgtggtgggcgggatctgctagccaggtgtgggctcctgggtcccgcctgtgggtcgctgggaggtgggtccagtctgagcgcccctccctgtccacaggtggcccgaggacgctccctgctccacgtctgcgccgccgccggagtccactcccagtgcttgcaagattccaagttctcacctcttaaagaaaacccaccccgtagattcccatcatacacttccttcttttttaaaaaagttgggttttctccattcaggattctgttccttaggtttttttccttctgaagtgtttcacgagagcccgggagctgctgccctgcggccccgtctgtggctttcagcctctgggtctgagtcatggccgggtgggcggcacagccttctccactggccggagtcagtgccaggtccttgccctttgtggaaagtcacaggtcacacgaggggccccgtgtcctgcctgtctgaagccaatgctgtctggttgcgccatttttgtgcttttatgtttaattttatgagggccacgggtctgtgttcgactcagcctcagggacgactctgacctcttggccacagaggactcacttgcccacaccgagggcgaccccgtcacagcctcaagtcactcccaagccccctccttgtctgtgcatccgggggcagctctggagggggtttgctggggaactggcgccatcgccgggactccagaaccgcagaagcctccccagctcacccctggaggacggccggctctctatagcaccagggctcacgtgggaacccccctcccacccaccgccacaataaagatcgcccccacctccaccctcaccctctcctggctcctgtctgtgcctgacggggttgggttttccgagagcaggtgcaccctgggctctggtggtcacagcaggggtgcgtccagtactgggatttcacatgcgaggacgggtctgctgagaccgcagtgggtgttgggtggctcggggcatgggctggacagggcctgaggctgtcagccggactgggaacttggaaggtggctggggccgaccccgtgcctcagagccacacagaagagagtgggcactgacctgagccttctctgagcctgttactcctctcggcatgttttgggcctgacaaaggctgaggctttctgctgcctgccctgcagctgcctgcacccacccacctgggcgggctgcttgggcaaggttcaggggtggtcctggctgctcctggagagtgggtgtgtgaagctggtgcccagaggctgagggatgcccagcccctgcccgcccagcacacggaacagatgtggttgcagggctggagagcttgggggaccaggagcttagagcgtggaggttgcaagttgcaggaccagtaactgggtctggagggaggtttgcagcggctgtgtcagccctgcaggccgagtgtggcactgggccttctgctggtctgagcgggggtctcagggtggaggtcagcaaaagaggcttagtgggggcttagggagcctgggtgggttcccagagaagctaggaatcagatgggaagatgggaaggcagtgtgtttccgtgttgggcaaatccagcgttttcatgccacggaagccaagaaagggctcacggcctccggcctcacagggctacgcaaagggggagttgaataaacacggtgacgggccccgggcggcagctgctcccggcactgatcctgctgggccagcggtggacttgcagggcccacatccggagctgcccactggtcctcgtgctgcacagccttggaggatctgaggctggctcagggtccctggcagcaactgccctgctaggtgggggctgctgggttccacagctgggccctccctgccggctgccaccaggcggcgctgcacgcccacgctgagtggggcaggccctggagcccctctgcccgggcagcctgacggcccctcctcctcggctgagaccgcagagtcccaggcatcacccactgaaagtgtgctcagtgacctgtgaatagggatgccacgtctgcgtgcagacattgattaggcgcctgtggtatacctggagctggagggtgtgcgtggacaacaggcagaaaggtccagtgggatggaggctgccaacaggacgatggggaaggggcgcgttggggacatcgccgggcacgcggcccaggtgggcccctggctcaggtctccccccacctccctgcctgggctctgtccatctttctgccgcaccctcagccccaggtgtgggcccaccgtgcttgtggacgcctcatgctctgtaccgggtgggaggtgtgggagttacaggtcagggcagccttgggagacgggcaggtttcctggggtgcttaccggcagatggggcgcctgggtccgtgcagggtcgtccgcccgagaaagcagcccctcacccctgggcactaacttcatcttttttctttgcacacagaaacgtaaacctgattcacaaaagtataaccactcagcatgtagctttgtacacctgccctcagcatttagtgtcctcgttcatccaacaagcatctaataagcactggggtacgcagtggtgggtgtccgccccgtcactgggtgtccagcgtggggtgcggaggtggatgtccaccccgtcggtgggtgcccggcgcggaggggtgcggaggtggatgtccgccccgtcggtgggtgcccggcgcggaggggtgcggaggtggatgtccgccccgtcggtgggtgcccggcgcggaggggtgcggaggtggatgtccgccccgtcggtgggtgcccagcccgatgtccaccccgtccctgggtgctcttggtggcaactcgctgaagcctgcctcggtttccccagaggtgagatggggaagtcaccaccgccaggtcatgagatgagattagatcatccttgccaagtatcaggaaaaggcctcagggctcccctgggaaccttggggtctcaggagtcccagctcccagtgggcaggggtagggttggggcggccagaggaacaagtgtttgttcatgggctggaccccaccgcggccccaaagctgggctgcctattcctgtcctgggcaaattggcctctcctccctcttaccccccaccccagtgggagcccacaaggacagggcctgccccatcccctccactctgggctgtggctctaagcagcacgtcccactctaggggctcagggcagggacagtgactcatccaaggtcccgccgtggagggcagagctgaaggagtgagaaggagctgctgacatggaactggcccgtgcggaaagactttggtcttccccatatttttcaccaggctcctggggcaaggtgagcccagcagggagaaggaaacttgtgtgaatcccaggccagcaggactgggggccctgctctcatcgcagacgctgcagacacggaggcctggggcaggggccctcagggctgtgctcctgcagagatggagcttgcgtgtgtggctgagactgggatgccaccccctttcctaagcctctgtttcctccgctgtaaatgtgggcccaggcctgccatgcacagctcatctctttaattttcttttttttttttgagacaagggtctcattctgtcacccaggctgtttgtgcagtggtgttgatctcggctcgctgcagcctcgacctcctgggctcaagtgatcctcccacctcagcctcccaagaacctgggaccacagatgacacgcacccctccccctggctcgtttagtatttattgagtcaaactgcagattttccaggcgggctcagtgcctgccctggcctgattttgtcttcctggtcttaaactgcttttcactccaaaggccccaaaattgtataagctttcagggcgtgcgacctggacctgtcctgactaagtgggaaatgtaggtccgaggttggtaaatccggtaaacaatgccgagagaggctgcagggggcggggagatggggaagaccctggggagggaatggcagggcctggggaggttcagcgaggaggggtctgggagttcggggtccagtgacccaggcacacaaaggccagactcgggcggaggagtacaagctgctggagggacccgggctttcttccaaaggcactgggagctgtgagtggttttaggccacagaccgatgtgactgactgaggggccaggccctggggctccatgctccctacacaagccaggtgcggtcccacctcaggaccctcgcacaggctatgccgcctgcccagagcttcctgcagcttcccgggccgcaccccctccttcaggccttctcccagcacctggccccctccccaccctgagtgtttggacaatgctcaccaccttctgctggacagtatcttacttgctactcataaggttgactgtgatacccagctttctcccctggctggctctctgagtcagctgtactggc[136 bp omitted]ccaggttcaagcgattctcctgcctcatcctcctgagtagctgagattacaggcatgtgccaccacatccggctaatttttatattttttattagaaacagggtttt[145 bp omitted]caagcgctggagtgcaatggtgtgatctcagctcactgcaccatctggctcctgagttcaagcgactctcctgcctcagcctcccaagtagctgggattacaggcgcccaccaccacgcctggctaatttttgtatttttagtagagatggggtttcaccatgttggccaggctggtctcaatctttaaatattttttaaattaaaataaatgagcatggctgggggggtggctcacacttgtaattccagcactttgggaggccgaggcgggtgggtcacctgaggtcagcagttggagaccagcctggcccaacatggcgaaaccctgtctctactaaaaatacaataattagccgagcgtggtggcaggcgcctgtaatcccagctactccggaggctgaggcaggagaatcgcttaaacccgggagtcggaggttgcagtgagccgaggtcacgtcactgcactccagcctgggcggcgacagagcgagactccaactcaaaaataaataaatacataaataaacagataaatacagagtactccggcctgggcaaggggtcagagtgagtgtgccgaggccagggagggtccccgtgcacactgacaggcgctggcctgggtaagcctgtgggctgcagagccgtcgccaggatctggtgacaaggaccccgagccacagcctcccttgtgacttgcgggttctgccggcgcctgcaggaggcgtctttctgcttctcccactgccaggcatgggcggttctcgtgccgtgcgggtcccgcctcctccctgctcccagccgcgagccctggggctctggcgacctgcccggcctgacatcttcccagggtgaacataaaagaacccccttcagctggagcacgcatctgcctcggggcgggccacagcctggcactgccaactgtgccgcccgcccggcctctcccgcaccaccttgggacaaacagctgtcctgcccgcctatgcggaggtggccggcggggccggcgtgggggcgcagggatccccagggtgtggggcagccaggccgaggcgagagacacggtcgggctcagcccatccactgtcagccgggcacatgctggccctccctcaagtaccactgagtgcctcctgggtgtaggaagagggccatctctgccccggtggcctcgaggtgcagatgggtggggggcacccggcacacgggacatcgtggctgagaggacgtcaggccaggtgccaggagggtcccaggagggcctcctgcctccaggtggggatgttcagcctccacttcttcgagtgtgactgtctgtctcctctctctcacttgccagcttcctcacctgccccctcccggctgtctggtgggctgggtggctagggacagaggcctcatgtcacctggcaccaagcagcacccacgcccagccggcttcggcccagaagcagagccttgggaagcacctgtctcagagctggggactggaggcactgggggcacagctgcacccggagtccgaggggtcggggaaaggaggcaaccccggggcagggggctctggtacccgtgcgaaggcgctagtgggctttgggtctccctgtgaccccaatctaaagcccaccagacctagaggagacccccgccgcacggctccccagggcactgtttgaggggtgggtgggaaccccacaccctcgggtggcttttccagttttccttgtctggctgggcttggcctcagtttcctcaaatgcagaccagggagaggagtgcctgagtctcccagaacggcgcccaagccggcctgcccctccccacgcactcaagggtctctgtccagggcccacaggcgacccagcaagggctcctgtgacctttagaaacaccctttcgtcgtggaagtcttcaaacctcacagaaagcaaggaggcgctggccgtggcggcctctcccgtctcccaggcccgcgtccaccctccccgcgccggtgccctccggacagaggtggaagccgcggcgcaggagaggcggctccggccgggcagcggggcccggtgaccttgggcgcgtccttacacgtcgcgggcctcagtttcccctcctggggagaggcccgcgcggggctccgaggcctcgggccgcgtgaccttggggcgcccccgaccccgcggcccgagtttcccggcgccgagcggaggcggcgcgcggggagggggcgcagccgaggcgggtctcccgcccccgcccctcccccgcccctcccccgccgcgaggctccgccccccgcggctccgccccgccccgcccccgcctcccccctccctcgggctccggccggcggcggcggcggcggctccgctccgcactgcccggcgccgcctcgccatggacgcgcgcgggggcggcgggcggcccggggagagcccgggcgcgacccccgcgccggggccgccgccgccgccgccgcccgcgcccccccaacagcagccgccgccgccgccgccgcccgcgccccccccgggccccgggcccgcgcccccccagcacccgccccgggccgaggcgttgcccccggaggcggcggatgagggcggcccgcggggccggctccgcagccgcgacagctcgtgcggccgccccggcaccccgggcgcggcgagcacggccaagggcagcccgaacggcgagtgcgggcgcggcgagccgcagtgcagccccgcggggcccgagggcccggcgcgggggcccaaggtgtcgttctcgtgccgcggggcggcctcggggcccgcgccggggccggggccggcggaggaggcgggcagcgaggaggcgggcccggcgggggagccgcgcggcagccaggccagcttcatgcagcgccagttcggcgcgctcctgcagccgggcgtcaacaagttctcgctgcggatgttcggcagccagaaggccgtggagcgcgagcaggagcgcgtcaagtcggcgggggcctggatcatccacccgtacagcgacttcaggtaccgcctccgggagggccggtcggcgcgagggggcccggggagccgggcgcgcggggagccgtccttggagcgcctggggagggcggggcggcgcgccgggccggtgacctcggggctcctcggtgacctcgggcgtgtccgggacccgccccggagtgaccccggcgcgcgaggctccgcctctgggggggctccccgggtgaccgcggagcgcccccctcccacgcaccccgacatcctccgccctgcggcgcggcgggtggggtgggccgcagggccagggtctgagcgcagaggggcagagaggacgaatagaggggaacgtgggccccagagaggcggcggagcgggagggaggaggaacgaagggcgcccgggaaggacgcgccccagggaggccgggggagagggggttaagcggctcccacggcgtccacccgcgccccgcctgcgaggaggcgcgcccggggccgcgggcctggaaagcgtgcgggtccccaggctgtgtccccgggagccgctccacccgagccgcgggcggtgcgcgcatgcggcggtgggtgtgtagacgccgctgtggatccagccggctaatgcgtggaaggctcggagcagggccggcgcggggccaccgccactgatgtttgcggtcgtggttcctgggctgtgcgtgctgtggccggagagcgagaccggcgcgtgtccccgtgggctgtgtgtgaacaggggcccgtgaccgcggcggggttcccggggcgcgagcctgtggccggagaggtgtgtctccaggagtgtgtttgcgtggtggtcgcgggcgtgtgcgcctccggtgggtttattttggtgggacgtgtggtttgtgtgtgttgggaccaggtggcgggcgtgcgcgtgtacgcccggggccggtgtgcaccggtgggcagtagtgtgagccgcaggcaggtctcacacacgcgaccatggagggatgcgtgtgtgtttgtgtatccacgagtggggtgtgaggtggggtgtggagggtgcaggtggagggtgtaggtggggcccgccgggctagcgaggccgggcgcgcgggacgggcgcggtttcagcaccacggacagcgcgccggacctgggaagcctgcggttttcccgcctgtctctcctcctccaggcctgggcgccccaggacagcccccacggaccctggacccccggaactgggcagggaggctgtggggttctctcttcccctggattctctgcacccctagtgcttgactggagaaactgaggcctggggcacatgcgtcctggacagagcctggaggaaggccctggaatcctcctcccaccccaggccttcctgagaggtgaatacagctttgaccagaagcctggatttcgagacaggccaggggtgggaggagccccgaaatccccagaggggctgtgtccggcccctcccaccctgcctctgtgccccaccgggagagcttggtcagcatctgggctctggcctgcgaaatgtggacagtgagcgggaaggactggacttccagggctgctggtcggcctggccccacttccagtcgggcagtggcaccccctgaccggagagggacgcggtggagagggagctgtagaacgtgcccactcccctccgtcccctccagcatgaccttcgacagagatgggtgcaccgcagcgtgggggctggcaggtggaggcccacaccagccactccctcccctgggcagctccagcgaccccctggctgcagaggggcggtcggtggcctggggggcaggtgggcagatggctgatcccggggcttggggggaaggccggtggtaggagtgaagccctctcatccttccaccctccttgggcgtggtcgcctggaggcctgggcaggctgtggccccgctctgtgctctgaggcatagagggctcagaggcccctgtgtggaccaagtgcagccccaccccggcagatgagtgttgaagtggaactgagcaggcagggaatggggttagcggggcctgtcttcgggactaggggagtcacggcagtcagattttaaaaaaggatttcgatgttgccaagctgggtgcacggggcccctaggaccctccccaggcttgggacctgtgccagtgtggaatcagtgtggaaaaagacccccaagaatatctcaaaagctccctaagcaggcggccggaccctgctgtggagggtgttttggggcagcccacagcaagcgaaggggcctctacgtttgcagctgactcaggagcctggccccaactggcttcgggcccaaggcctcctgtgcctggctgggtgtcttgggtcctcgctgggcccctctgcctcagtttccccaattgcacggtggggatggtatgagggagaaggatggggtctttcacagccttgccagtgtctcagcctcacgtctcacactctcttcacctccccttcctgctgagagagtgctgtgctccttgcccagcctgtgccccccaggcacgccctcaccccggttcttcctcgctgcccagctgtctccgccacgcccaagtccaccctgctcccgtgctcggaagtggcctctttcacgccccacgtcccagtcccagtatacagcaggtgccacatatttgctgaattttctgaggggcagagcatgggtcctgggctgacgtgggtccagatttcggctctcaggcctgggcggctggcccctttggaagtgcagttggtgccagggtgcagcggctcacgcctgagatcccagcactttgggaggctgaggcgggcggatcacctgaggtcaggagttcgagagcagcctggccaacatggtgagatgatcccgtctctactaaaaatgcaaaaattagctgggcatcgtgacgagcgcctgtaatcccagctactcgggaggctgaggcaggagaatcacttgaatccaggaggcagaggttgcagtgagccgagatcgcgctgctgcactccagcctggctgacagagtgggacttggtctcaaaaaaaaagaaaaggaagaagaagtgcagttggtctattgctgaagtctctggggctgtgggtggctctacaccccggcctgacgtctgaaagtccccagaggcatgctgggcgcttccctggggtgctggtggaagagcaagttcaaggacccaagttcaaggttttgggttccagaggctcaagttcccttccttgtaggtgatcacggttggtgcctgaattggaacaggcgtgaaaaccaagaaggaaggggtttggccttatgcaacccccagggcttcggcagggtcttctgtgcctcccagagcaaaattaggtcaaaaataagtatagttcattcctactcccttcaccccagccgccgctgattctaaaggccacacaggtccacttgggaaagcctgagtcgtgcaaaggagggtgtctccgcaggagaggggcaggggctggaggtctctgcacgagaagggctggggctggagggtgtctccgcaggagaggggctggggctggaggggacacgaaggcccagggaggggcggtctgaggaggtcgcgttctccgaagcttgctgtcatccaccctccctgcccccggtgtcaccgagggggctgggcagacctggcggggtggagacctgggcagatccggggtttgtgccctgggagctctggggggcacagggcaggtgtcgggtggagagaggctggcggcttcctgactgccctcggtccagttccagggctaagtgccctgtggccgccctgccgtctcctgctgctgctgacttgcaggtctgtgtttctgaattgtcttcagctggggaggccccgtgtgaggggagacagacgagatgctccccaaagccaggatctgttatgtcccctggggtccccgagaggactggtcggggaggagctgctccaagaccccaccaggacaggcggcccctgggccccgcctcagatggctgagtgggtcagcgggagatcagcctgggggtgcagctctgcaaatccgcagtgatgaatcccagcattagggcgtgggaataaaccccccattatcctggggggatggccccgggggcagggcgaggcgagggtttgtctggctctggtcacggcaggaaggcccagcgtgtgcaggatggtggggtgtgcatggacccatatcccaggtggcggtggcctgccctctggtctgcgtggaggggtcaggggtcggggtggccaaggcctccccgctctcttcagggccttccctatgttccctgctcgaaaacggacatctttgtccaggcactgtggctcatgcctgtaatgccagtactttgggaggcggaggcgggaggatcgcttgagcccaggagttcgagaccagcctgggcaacatagcaagacccccatctctacaaaaagttaaaaaattagccaggcgtggtggcgtgcacctgtagtcccagctactctggaggctgaggcgggaggatcacctgagcccaggaggttgaggctgcagtgagctatgatcgtgccactgcactccggcccgggaaacagagtgagaccctgtctcaaaaaaataaaaaaaacctaaaaacccacatattcaagtcaccttcatcagccccccactcacttgggccgggccctgcctcaccccccaccccacggttcagcctcgcaccctgtgcgctggccgcctctctcctgccagatgcctccccgtccccctttctggcctcccggctgtcagcatgggcctctccagacatcggtccttctttccctgtcacctctacctcctccctggctccagccctccccagtcatgtcccctggtcccgaggccgcccaccggccttgaagggaacccggagcatcaacctccgcacctgctgcccctcttcagccactgccctcccctcaccatctcatccacccacacgccacctcctccaaggagccctcccacctgcctggggctgacaggcccatcccatgtgtctgtcttggggctgggcctgtgtggtcatcgtgtgccccggcgcccggcgagagttcggtgaacatctgccccgtcgggatcacccgggaacccgagatctcccccacccgtagcagctccctttcttaatcctgggcacctgccacggatctggccatgactccacagctgagagtgccgtctcctaatcccccggcccgaggctctcccttaatcaccgacctccggcccctaatcctctcccggattgtccccatctgtaaatcctggacggcctccggcctgaggctgggctcctgcggggagggcctggctgccctcgcccgttccccaacccgggactcaggctccagcaggggctgaagaccccctgggcaggccctcccctgggatccaaggggctgagggtcctgggccttctgttgccaggagacctggtgtcctcgtggggtttgggagccgggtcggcggcctcctcccccaagcttcatccagccctggagagacggggacctgcgtcggctttgggaacttcaggggaagaaccctgagctcggggcaggagaatgacatggtctgtctgggttcccatcccactgtttcacttatggctggaggagcctcagtttccgtgtcagagccgagagagaggctgggcggctgttggaggagggctgagctcacatcggtgtcaggtgccgggggccccactgaagccactctggagtgagagggggtccgaggcttcttccggtcccccaggtgtgagagctgaggccggaaggtttccccagggacccagcctcatcccggcctccggagctggtctccctccctgcctgcgagggccaagctggacaaagtggcaggacccccgcgtttccgaggaaggggccctcgtagaggcctcactgttacctgtcggggatgggttttaaatacaggatttaatgatggtcactgatgtttctgtgacagctgaggggggcctgtccctgctcagcactggggttggacaaggagggcacagggtgcccggggagtgctggggcccgcctgggtccctatggtggccggatggggaaagggctgccggacgcggctgcacagagtgtgagggggagtggggttgggctttgggccttcccctgaccccaggtcccctctctggggtcctgtcttctggagctgcctccccctccccagggcgagaggcaggagagggtctcccaaggtcactcagtctagtgttgggcaaggagagggttggggtggagagggttggggtgcaccggcagagacagtgacgccctgcagggctctggggtcccctctgccccaggcctcggtttccccttggtaggggacatgcgtgggcgcccttcttccttctgacctctggctggtgacgacgagggttgcggccccaagccctgcttggaggcattgtggttggaacgggcaggcccagccccacaagggaccctcagggtggccaccccacctgtcccttctcctaggcccctctgctctgacccccgtaatccccaggaatactgccctgctgggcaagatgggctgaggagtcctttctggggacacaggagcagaaggctcaagggaggtggtttccagacagtgtgggccgtggataagaggacagtcctggggtctcatcctgcagtcccacttccatcagaggggaggtgtggtacctgcccccagctcaccccaagaataaagggggagaatgtctgttaatcatcacctggaaaggaggccttcatgttatatggccgtttaaaaccaggtaccccttggcggtttctaggtcctcctggtggtttctaggtctccttggcggtttctaggtcccccttgacagtttctaggtctccttggtggtttctaggtcttcctggtggtttgtagatctccttggcggtttctaggtcctcctggtggtttctaggtcccccttggtggtttctaggtcctcctcgtggtttctaggtctccttggcggtttctaggtcccccttgacagtttctaggtctccttggtggtttctaggtcttcctggtggtttctaggtcctcctggtggtttctaggtcctcctggtggtttctaggtcccccttggtggtttctaggccctcctggtggtttctaggtctccttggcagtttctaggtcctcctggtggtttctaggtctccttggcggtttctaggtctccttggcagtttctaggtcccccttggtggtctctggagccccctgggagtttctcctcgcccctcgtgggggaggtttctaggccctgtggccttctcaactgctctttcctgctggttttgtcccaagactggtgctcgaaggtgggaggcaggtctcaatccagagggtgaggctggggctgagctccacggtgagccccctcggggctgaggggcagggggccagcggcaggcgggtggcatcccctcagcccactcggtgctggggccctgggggtctcgttgctgagcagatgtgtcggactgggggcctgagccctcatgtcctgtctagactcagggaaaggaaggccttaaatttctagtccttttagtcatttgatttcacccttcaagcttgtgaggggacccctccccaccccgagatcaagtcagccttttttttttttgagacagagtctcactctgtcacccaggctggagtgcaatggtgcagttttggctcactgcagcctcgacttcatgggctcgagcaatcctcctacctcagcctcccaagtagctgggtccacaggtgcgcaccaccacgctggctaatttttgtattttttgtagagacgggatctcactatcttgcccaggctggtcctgaactcctgagcttctgtgatcctttagtcttggcctcccaaggtgctgg[284 bp omitted]agcctccttaagccctggaattacaggcgtgagccaccgtgcccagcctgagtcagcccttctctaggttttatccccagcctgggtggttcttggggggtgtcccgaaggctcagcccctccccatcccgaggcggtggatgcttggaagaagagactgaggttctcaggggctgcaggaacttgtccaaggtcactgtgccagcaggcgggtgccagcccaggtctggctgatgccaccacgatgtgagtcgctgggtcccttccagcgtttggctcttgcagaccgagctgctgtgaacattttggtacaaatggctttttaatttttttctcttccttttggaccgtttcctcgggatcatttccccgaagtggagcgtctgggtcaccccgcagacgtggtgttaacagcttttccctcgaggagccgtccagaagcaaggagccgactttcggcggctcctgaaacaaaggtcccggcggccacgccagcgatgagctcccaggtttttctttattggtgttaactttggggagtccctccagtccctcagcatctcctccgaaaggatgtggggaccccggccatgata[226 bp omitted]ggagggtgaggcaagagaatggtgtgaaccctggaggcggagcttgcagtgagccgagattgtgccatcgcactccagcctgggcgacagagtgagactctgtctcaaaaaagaaaacctcaagaactaagaaggctgagttggtacagggatgggaaggggtcccgtgtgtgtgtgtgtgtgtgtgtgtgtgtgtgtgtgtgtgtgtgtgtgtgtcagagggtctcatgttacccaggctggtcttgaactcctgggctcaagcgatcctcctacctcagcctcccaaaatgttggaattataggcatgagccagtgtgtttggcctagcccccagtgttaatggcaaaatcctatgaatctttgtgctggaaattcaagaccctcccttgtctgagtcaggcacacgcaggccatgtgggctcagaccccagtctggaacctccccttcagcaagagcccttggccccagagcccagaggtttttgttttgttgtgttttgttctttgagacagagtctcgctctgttgccccggctggaatgcagtggcacgatctcggctcactgcaacctccacctcccgggttcaaacaattcacctgcttcagcgtcccgagtagctggtactacaggcgcccgccaccacgcccggctaatttttgtattattattttttgagatggggtctcactctgttgccaggctggagtgccatggcgtgatctcagctcactgcaacctccgcctcactggttcaagcgattctcctgcctcagcctcccgagtagctgggactacaggcacgtgccatcatgcccagccaatttttttttttgtattttttgtagagctggggtttcactctgttggccaggctggtcctgatctcttgacctcatgatgcgaccacctttgcctcccagagtgctgggattacagacgtgagccaccacacccggcctaatttctgtatttttagtagagacggggtttcaccatattggccaggctggtctcaaacccctgacctcaagtgatccgcctgccttggcctcccaaagtgctgggaacacaggcgtgagccaccgcacccagcaggcttttttcttttatcagttttccaattagccattgtaaaacctatcaatcagtgtcattaagcccattcttgctgttgtacaaccgtcaccactatccatagtccatacctttctcattcccccggacagaaaccgcaccccgcacatgccacttctcacccctccaacccccggcccccggcacccatgcatccccttcctgtctctggattggcctgtcctggacatttcgtagaaatgggctcacacggccgggcgcagtggctcaggccggtaatccccacactttgcgaggcctaggcagaaggatcatgaggtcagggtttcgagaccagcctgaccaacatggtgaaaccctgtctctactaaaaatacaaaaatgagccaggagtggtggctcatgcctgtaatcccagctactcaggaggctgaggcaggagaatcgcttgaacttgggaggcggaggtggcagtgagccgagatggtgccactgcactccagcctgggcgacagggtgagactccgtctcggaaaaaaaaagaaatggcttctctcactgaacgtgacgtcctcaaggggcatctgcgccgtggcctgggtcagagcctcactccttttcgtggctgagtcgtgttccatggtggacgggtcgcgccgtgtttgtccctccgtttggtgatgggcacctgggctgcctctgcctttttgctactgtggatcgagctggtgtgaacacagcggagtggtcgtcgtccgcagtcgagctggtgtgaacacggtggggtggttgtcgtccgcaatcaagctggtgtgaacacggcggggtgctcgtccgtccttgttttcatttctttgggtataatctcggggcagggagaggctggtaattttatgtctttttaaggagccacccgtgtttgctccgagtcgttttgattttcattttctcgatagcgaaagggttgggcatctgtccagtagccatttgctgaccctctatgacctcctgtgtggacgcggcactcccagcaccgtgtctggcccgccatacgcaggccctgaaccgacaggaccttttctgccagagcttcccagggagagttttgggatccaccttggggacttggactctggccgggtgtatctgggagtggaaacgccctctggtctcttgtccacgggtatttatcatacggaacgtccgaatggtgccaagtccggctcggccgttcctcccaccctctcggcctcccctgtggcgccagccccgtctctgcttggcttccctccctcctgtgtggacgccccacttcctcccctctcctcctgcgtggacgccccactccctcctctctcctcctgcgtggacgccccacttcctcctctcctgcgtggacgccccactccctcctctctcctcctgcgtggacgccccactccctcctctctcctcctgcgtggacgccccactccctcctctctcctcctgcgtggacgccccactccctcctctctcctcctgcgtggacgccccactccctcctctctcctcctgcgtggacgccccacttcctcctctcctgcgtggacgccccactccctcctctctcctcctgcgtggacgccccacttcctcctctctcctcctgcgtggacgccccacttcctctggaaatgcagccggtgctgccctggttcagtcttcctgtggcccctgtggaggctcccgcttctcagtaaggcatctggggccctcacctcccggcgtgagctgagcacggttcatttcccaccctggcttcccgccttcgctctccctgtgcgcgccgccctgcctcgccctgctgcttcccagtgcccctctgcaccccggctcctctctgctcctctgctgtcctgtcctgtctatttttttaacgccaaccttgtgccaggcacattgtccctctctggtcatgtgaagcacttaatctattttgagccacctcttgggccttgtgaggtctcctgcatcttcaaggacacggggtcaaagttgggcctgaggaagggacctgggctagggcagcgcagtgggcgttgggctccctcggggctgggtggccttcctggggtgggagcctggtcccgagggaggagtgcccagggcttgtcctgcaggcgcctggggggaaggcaccggcctgagctgtgggcaccctcgtcccccagggaggaatgcccggggctggtcctgcaggcgcctggggggaaggcaccggcctgaggtgtgggcaccctcgccccccagggaggaatgcccggggctggtcccataggtgcctgggggaaggcaccagcttgaggtgtgggtgcccctcgtcccacagggaagagggcccggggctggtcccataggtgcctgggggaatgcaccagcctgagctgtgggcaccctcgccccccagggaggaatgcccggggctggtcccataggtgcctggggggaaggcaccagcctgaggtgtgggcaccctcgccccccagggaggaatgcccggggctggtcccataggtgcctgggggaaggcaccagcctgaggtgtgggtgcccctcgtcccacagggaagagggcccggggctggtcccgcaggctcctcggaggaggcactggctcgaggtgtgggcgcccctcgtcccccaaggaagagtgcccggggctggtcccgcaggtgccccggggaggcaccggcctgaggtgtgggcaccctcgcccccaggttctactgggacttcaccatgctgctgttcatggtgggaaacctcatcatcatcccagtgggcatcaccttcttcaaggatgagaccactgccccgtggatcgtgttcaacgtggtctcggacaccttcttcctcatggacctggtgttgaacttccgcaccggcattgtgatcgaggacaacacggagatcatcctggaccccgagaagatcaagaagaagtatctgcgcacgtggttcgtggtggacttcgtgtcctccatccccgtggactacatcttccttatcgtggagaagggcattgactccgaggtctacaagacggcacgcgccctgcgcatcgtgcgcttcaccaagatcctcagcctcctgcggctgctgcgcctctcacgcctgatccgctacatccatcagtgggaggaggtgaggtggggcgggggcggggccaaggcagcaggggcggggctataatggtgcatgggcggggccaaggcagcaggggcggggctataatggtgcatgggtggggccaaggcagcaggggtggggctatgagagatctgggtggggtcaaggccccaggggtggggctatgggagatctgggtggggtcaaggccccagggatggggctatgagagatctgagtggggtcaaggccccagggatggggctatgagagatctgggtggggtcaaggccccaggggtggggctatgggagatctgggtggggtcaaggccccagggatggggctatgagagatctgggtggggtcaaggccccaggggtggggctatgagggtgcaggggtggagctacaatggtgcagtggtagagccaagacagcaggggtggggctatcaggttgctgagcagggtcgaggcagcaggggcagggctatgatgctgctggggtggagtcaagcagcaggggtggggccgtgatatctgggtggggtcaaggagcaggggcagggctgtgagggtgctgggcggggtcaaggcatcaggggcggggctatgagggttgtgctgagcggggtcagacatccgagtggagatatgagggttgtgctgggcggggtcaggcagcaagggcgggactatgagggttgtgctgggcggggtcaggcagcaggggcggggcaatgcgggttttgctggggcagggccagacatcaggggtggggatatgagggttgtgctggggcggtgtcagacatcaggggtggggagctgtggatttggggggtgtcctagggcgggggctgtggatttgggggggtcctgcagtgaaggctgtagaggtgggcggggtcctggggtgggggctgtgggtttggagggcgggggtcccggggcagggctgcagggtggggcgggggtcctgtgcggggccttggatttgggggagggggccaggagctcccgcagtgggggcgcacggggctggggctctgaaggtgggggccgggggtcagcgggtagggtgggctcacggcgccttcctgcagatcttccacatgacctatgacctggccagcgcggtgatgaggatctgcaatctcatcagcatgatgctgctgctctgccactgggacggctgcctgcagttcctggtgcctatgctgcaggacttcccgcgcaactgctgggtgtccatcaatggcatggtggtgagcgccgcgggccctgacggagggggagacgcaggctcccatacagaggggggacccaggcccccttatcccgcttacagagggttgaacccaagcctttcagaggtggggacccaggcgcccccttatggaggggaggactcgggcccttacagaggtggggacccaggcgcccccttatggaggggaggactcgggccctttcagaggcggggacccaggcgcccccttatggaggggaggactcgggcccttacagaggtggggacccaggcgcccccttatggaggggaggactcgggccctttcagaggtggggacccaggcgcccccttatggaggggaggactcgggccctttcagaggtggggacccaggcgcccccttatggaggggaggactcgggcccttacagaggtggggacccaggcgcccccttatggaggggaggactcgggcccttacagaggtggggacccaggcgcccccttatggaggggaggactcgggcccttacagaggtggggacccaggcgcccccttatggagggaaggactcgggcccttacagaggcggggacccaggccgccttacagagggagagacacaggcccttcaggggtggggacaagacccccttacacgggaggactcaggcctctttacagagggggacccaggactgcagccccggcactggccccttaatgtccctgggggtctgaaacagccacttggaacctttcaggcctgggatcatccgtggagagaagctgagtgtggttatgatgagtcctgtcacccagacatctgcttagcgcgttttccaatggatttcccttttaattaacccacattaattattattattttatttacttatttttttttgagactgagtttcactctgtcgcccaggctggagtgcagtggcacgatctcggcttaccacaaaccccacctcccagggttcaagggattctctcgcctcagcctcccgagtagctgggactacaggcgcccgccaccacacctggataattttcgtacttttagtagagacggggtctcgccatgttggtcaggctggtctcgaactcctgacctcaggtgatccgcctgcctcggcctcccaaagtgttgggattacaggcgtgagccaccgcgcccggcctggttggatcccttgagcccagaagttgaggctgcagtgagccatgattgcaccactgcactccagcctgggtcacagagcaagacctgatctctaacaactaaagaaaaatttacaacatggccctgaattgggaaagtggtatcaccatgccaaagaaataataaatgggccaggcatggctgctcatgcctgtaatcccagcactttgggaggctgaggcaggcggatcacctgaggtcaggagtttgagaccagcctgaccaacatgctgaaaccccgtctctactaaaaataaaaaattagccaggcgtggtggcgcgcacctgtaattccagctactgtagaggctgaggcaggagaatcgcttgaacccgggagcagaggttgcagcgagctgagatcacaccattgcactccagcctgggcaacagagccagactttgt[144 bp omitted]gagaaaccccgtctctactaaaaatacaaaactagcttggcgtggtggcgcatgcctgtaatcccagctacttgagaggccaaggcaggagaatcgcttgaacccgggagcggaggctgccgtgagccaagatcgtgccactgcactccagcctgggcgacaagagcgaaactccgtcaaaaaagaaggaataataaatgaagttaggtcccagatactccttgcttcctagctgagatgtgctgactgttaagaagggttagttatgggagccctcggccgctacagtcaggttagtggccagtgagcctttgtccctgcctggggagtgctgtgccccagcgtccagccacatatgggacttgggatgtgtttggtttggacacagagcaggtgggcattgatggggtcaggagctacagagggaagacccgccagtgcccctccccagagcctggcacagctgcccaggctgaggcagcccattgtctggctgccacccgcacatgcggtcccatttcctgaacagagccccgcggctcccctttcccggccgggtcagctgaggacttggtgcggcaggacctcctgggccggcctggtgtctctgcccgccctgcccctctgctctggcccagatgctccctggaacttttgccccctcttgacctcacagatgctctgatctcagaggctgcaaaaggcgggacccagactctcgcccttggggtctcagtttccccaggagtgaagcgggcaggtagaatcagccctggccctcctgccaactcactgtgacaagtgtgcaaaccatgtcatctacctgggtctccatttctcttggttacctctgaacatggggagctcaccacctccagtgcttggcagagggtgggcgctgggcccttgaggaccgagggctcctggggcgtgagcacctgcccaccaccgcccctcctgctggccttgcagaaccactcgtggagtgaactgtactccttcgcactcttcaaggccatgagccacatgctgtgcatcgggtacggccggcaggcgcccgagagcatgacggacatctggctgaccatgctcagcatgattgtgggtgccacctgctacgccatgttcatcggccacgccactgccctcatccagtcgctggactcctcgcggcgccagtaccaggagaaggtctgagggaggcgggccccggcctgggttctgatgggggaggcgggcctggatctggggtctgagagagagtcaggccaggccctggggtctgatggagggaggcaggcccggtcctggggtctgaggctggagggaggccttgccctggggtctgagggcggaggtagtccttgtcccggggtctgaggggaggggcgggcccggccccggggtctgaggggagaggcagtctcagcccttcactcagcttcaagtggcgcgctcagggcagagaccgcgtgatggggagcaggggaccctgggggtctgtggctgtgattaggaggagaaacggccggtggtgagaggttctctgaccctgtgacagggagggaggtccagagcctggagatggacgtggggcgggggctggggaggggatgcaggctgggcaggaaggggtgagttgggatcagggcaggacagggtcagtctttggacatcgggaagcccccgggctgaaggggcattgccaggaggctgggcccacctgggggtctctaggccggctcaggatggggctgggttagggaagggcctggcggggtctgagaggcctggggttgcttcaggacacgccggtggccggcagtcagggccaggcttcagggagagcaaggctgccccactgctcagatgcggcctctggcctgcagcgtccattgggttaatcctaggcttggcagtggaggggacacgggggagctgggaggggtggagggagattaggattggccccattggcagcccctggagttgggcctcatgcaccactctgtgcctcagtttccccatgttaggcggctggctggtcctggctgggagccaagtgcccccctctcccgcgccccgagcagtggctggctgggtcagctgggccccgtgccaggcgccctgctgtccggaagccacgggcctcacacccaaacataagctggtgccaccacccgcccgccgtcacgggttccgctgagctcagggcagctgcggccgggcggggctggggcggaagtgaggctggagctgccggggggcaccgtcctggggacagcagggcctggcacccccgcccagcacccacgctcccttccctgctcaggaggggctgacccgatggtttctggaaagatcatcagggaagggccagagcccccgggaagggggtcctgtgtgtcagggtacctggggcctctcctcgtagagtcaggtgcccacccattcctcagggatagggttgctagataaagttcagggcacccggcctggtgcagtggctcctgcctgtaatcccggcactctgggaggccgagacaggccgatcgcctgaggtcaggagtttaagaccagcctgagcaacacggcgagacctcatcgctacaaaaaattaaaaaattagcagggcagggtggtgcacacctgtaatccccactactcaggaggccgaggtgggaggatcccttgagcccaggagttcaagaccagcctgtgcaatatggcgagacctcatctccacaaaaaataaaagaatcagccaggcgtggtggcgcacacctgcagtccctgctactcaggaggctgaggtgggaggattgcttgagcccataggcggaggctgcagtgagctgtgattgcaccactgcactccagcgtgggccacagagcgagacagtgtctcagaaaaaaaaaatggaatttatcattgaaacgaattcaactttgatttaaatagaagcatgtttatttgctcttgttgaatctggccgcccctgtgtgtggcggaggcctgtctccccgctgtgggcgggggctttgtctgacccagccctgaccccccacagtacaagcaggtgtgaaggcctatctccccgccacaggccggggggctgtctgacccacaagcaggtgcccgtgtgcccgctgcaggctgggggcggtgtctgacccagcctcgcctccccacagtacaagcaggtgcccctgtgcccgctgcaggccgggggcggtgtctgacccagcctcgcctcctccccacagtacaagcaggtggagcagtacatgtccttccacaagctgccagctgacttccgccagaagatccacgactactatgagcaccgttaccagggcaagatgtttgacgaggacagcatcctgggcgagctcaacgggcccctgcgggaggtgaggcgggcgccgggcgggcgggaggcagcctccggtacagggccggcctccctctcctggagcccaggagccggtccctgagggaggcgaggtgcctaggctgcagcaggagggactcgagctagacctgcgtacacaccctcccctccccgccccgtgagcctctgcacccccaggacccccgccacccccgccttgcttcccgctgcccccttagcagaactgcctgggtctgtgcctgacagggcggggcagaagcagggcagggggtggggagggaggagccgcagaggccccgctgagcaccaggtcctgggggcactgaggctgattggagcgggtttaactcccagctctgttccggtagcctgagtgaccctgggcaagtttcccagggttgcgggaacaaatacccacaggctgagtggcttgaacagcggagattcggcctcccaccgtcctggaggccggaagcccaacatcaaggcgtgggccgggccgtgctacccccccggagcccctggggaggatccttcctgcctcttccggcgtctggggctccaggcgcccttggcttgcagattgatctccctgatctctgcctccatctgctcacagccttctcccctgtgtgtctctgtctcttcttgtaaattcatccgtcgttggatcagggcccacccggttcctcgtggcctcgccttaactgggccatgtctgcagagaccctatttccacataaggtcctattcacaggaaccgggggtcaggatgtcagcctgtctttctgggagatgtagttcaacccacaacacacatcaaacagttattgagcgccgactgcgtgccctgccgtgtgcttgaaggtcccaccctcaggaagcggggcctagggatggcggccgtgatcacgcaggcagcagagagcagctctgggaagcggggagggacgaggacggggaggcgacatcagcaaggccgtgtgtgagccaggcagggtgtccccggtgtagcacctggctcgggcagaggccccgaggaggggctggaggagctgggcgaggaggcgggcaggacgggcctgacactagggacctcgggccccgggaatgcctctgggggggcgtgtacacccgttgctcccaggaggcacacactgcggttcgcttcgccaagaatgtttaattgcatttgatgactacggtttccattcattcatttgtagagatataacactcagaccacaaaatgcataaaatgcggtggcttttagtattaacagagtgctgcacccgataccacagcctcactccagaacattctcatgggcccaaaaggagacctggggtgttagtcaccagctcactccccgtccccagcccctggcaacccacgctacttagtcattatttaggtgtttaggagttgcaaagtcaaatctttaaacccacatatggccaggcgtggtggctcacgcctgtaatcccagcactttcagaggccgagacgggcagatcacctgaggtcaggagttcgagaccagcctggccaacatggtgaagccccgtctccactaaaaatacaaaattagccgggcgtggtggtgggcgcctgtaatcccagctactctggaggctgagacaggagaatcgcttgaacccaggaggcggcggttgcagtgagccgagattgtgccactgcactccagcctggacaacagagcgagactccgtctcaaaaaaaaaaaaagtaccaaaaagtgccccaggtcataagggcacagctcgatagctggtccctaaagggaacgtggtgtaaccaccacacagaacgaagctggaacgttcctgccgtccttagaagctgcctttgctaaggggaattgccctgacttcccacaccattgattcatctccagacccttggttttcatgttgatttttcaaaaatcacctgatagtctgaccgaatgtagctttccactggtgtgtgtgtgtgtgtgtgtgtgtgtgtgtgtgtgagagagagatggagtctcgctctgtcacccgggctccagtgcagttgtgtgatcttggttcactgtaacctcctcctcccgggttcaagagactcgtgcctcagcctcccgagtagctgggattacaggcacccgccaccacacccagctaattttttgtatttttagtagagatggggtttcaccatgttggccaggctggtctcgaactcctgacatcaggcgatccacccaccttggcctcccagagtgctgggattacaggtgtgagccaccacgcccggccttatttttcccccattttctttttttttttttttgagtcagggtcttgttctgcgctcaggctggagggcagtggtgtggggatcacggctcactgcagcctcgacttcctgcaccaccacgcctggctgttttttttttttccggtagagacgggggtcttaccgtgttgcccaggctggtctagaactcctgggctcaagcgatcctcccgcctcggcctccgcaaatgctgagatcacacgcgtgagcccccgcacccggcctcctttccaccgctcttgtctacagccgcccctcctggtccgattgtattggcagatgtcgccaatacggtgtcaaacggcgaaggggcactgagcgttttttctttctcccgtccttggcggcagcagctcggttccggctacggggctgagcccgtctctcagacgaggaaactggggtccgagaggtgagccggtcccagaggcagggcgagggggaagcgggagtggggtccgcagcggacccagccctgcctcccccctgcaggagatcgtcaacttcaactgccggaagctggtggcctccatgccgctgttcgccaacgccgaccccaacttcgtcacggccatgctgaccaagctcaagttcgaggtcttccagccgggtgactacatcatccgcgaaggcaccatcgggaagaagatgtacttcatccagcacggcgtggtcagcgtgctcactaagggcaacaaggagatgaagctgtccgatggctcctacttcgggggtgagcttgaggggggcgcgcctggagggggagggggcacgcgacccccgcggtgtgcagagccagggggccggggccggggccggggccggggatggggatggggatggggatggggccggggatggggatggggatggggatggggccggggatggggatggggatggggccggggatggggatggggccggggatggggccggggatggggccggggatggggccggggccggcaccagggagagcctgggtgggaagcgcccacgctggccaaggtgcagaggccgggccgtgtgcctgggcggggagggccgcggcgcccgcctcgtccagcaacccccccctgcgcgccacgtgcagagatctgcctgctcacccggggccgccgcacggcgagcgtgcgggctgacacctactgccgcctctattcgctgagcgtggacaacttcaacgaggtgctggaggagtaccccatgatgcggcgcgccttcgagacggtggccatcgaccgcctggaccgcatcggtgagcgggccgggggcgtggccggggcgggtgccctggcgggggaggggcgtggccaaggcatcaggagagtggcttggacagtggcagggggaagggcgtggctgtggcatcaggggcacggttggggcagagacgtggccaaggcatcaggagtgtggccatggcagcaggggcgtggctggggcaggggcagcggctggccgctcctaggacccctttgggtctagaggctgattttctgacctattgtcctacttcagccagaggcagcctgtttcccaagggagggaatgcacagggtgtttgcggttgtgccgaatgctcggtgagcacctgctgtgtgctgggggtgcaggggacagacccgggggcccactcagactcccagggaggcttatggactggtgatgaaatcacacacgactgggctgtgtgccagcagggcaggtggggccggtgggcttccctgagttgggaatgcagagtggagaccagggtaagggatgccatgtggaaacggggaggaagatgtgttcgtggagtggacacagcacatcccaaggccctgaggtggaaaagaggcctagagtccagagagccagggaggcctggaggaggttggggaagaaggggaggccagacacacagggcccagtgggcggcagggagagtttagactaaatcaggagcatcagggagccatggagggttctaggtgggcggaggacctggtcagattgtatccgccaaggcgggccgtgtccaggagggagacggtgacctggcctctcaggggggcagtctctggggcagggaggggcagagccctgatgactggatgtaggcgccagagagatggcggctcatgctgctgttcgtgggaatgggaatgaagaccatggctgaaacgcaggacaggtgcgacggagtggtgtcagggagctccctggtgtacagtaggaagctctccacaacttgctctatacagtgagtatgcaacccgttcctgagtatcaggtgcttaggttataacttctgtatacagcaggtgctcagcacaggctgtgtacaggcaggtgttttcggtatgcctgtggcacactggaggcagtcattacataatcagcgtatacaggtggtacacatgcatacttggtgcacagtgatacctgctccatgtacacagcaggcattaaatacctgtttactgccaggcgcggtggctcacgcctgtagtcccagcactttcggaggccaaggtgggtggatcacgaggtcaggagattgagaccatcctggctaacatggtgaaaccccgtctctactaaaaaaaaaatacaaaaaattagccgggtgtggtggcgggcgcctgtagtcccagctactcgggaggatgaggcaggagaatggtgtgaacccgggaggtggaccttgcagtgggccgagatcgcgccactgcactccagcccgggcgacagagcaagactccgtctcagaaacaaagcaaaacaaaagccctgctttctgtatgcaggtgcttcatgcatgctggctgtgcatagcaggtgctcagcctgtatatggcaggtactcaatatccatactataggccagagatgctacatatgtgcttattgtatacagtaggtggtaaatgcatgcttgctctacacggcaagcactgtgtgcgcacccgcggtgcagagtaggtgctcggtgcccgctgtacgcagcaggcgctccctgtgcacacgctaacgccccctctcccgcaggcaagaagaattccatcctcctgcacaaggtgcagcatgacctcaactcgggcgtattcaacaaccaggagaacgccatcatccaggagatcgtcaagtacgaccgcgagatggtgcagcaggccgagctgggtcagcgcgtgggcctcttcccgccgccgccgccgccgccgcaggtcacctcggccatcgccacgctgcagcaggcggcggccatgagcttctgcccgcaggtggcgcggccgctcgtggggccgctggcgctcggctcgccgcgcctcgtgcgccgcccgcccccggggcccgcacctgccgccgcctcacccgggcccccgccccccgccagccccccgggcgcgcccgccagcccccgggcaccgcggacctcgccctacggcggcctgcccgccgccccccttgctgggcccgccctgcccgcgcgccgcctgagccgcgcgtcgcgcccactgtccgcctcgcagccctcgctgcctcacggcgcccccggccccgcggcctccacacgcccggccagcagctccacaccgcgcttggggcccacgcccgctgcccgggccgccgcgcccagcccggaccgcagggactcggcctcacccggcgccgccggcggcctggacccccaggactccgcgcgctcgcgcctctcgtccaacttgtgaccctcgccgaccgccccgcgggcccaggcgggccgggggcggggccgtcatccagaccaaagccatgccattgcgctgccccggccgccagtccgcccagaagccatagacgagacgtaggtagccgtagttggacggacgggcagggccggcggggcagccccctccgcgcccccggccgtcccccctcatcgccccgcgcccacccccatcgcccctgcccccggcggcggcctcgcgtgcgagggggctcccttcacctcggtgcctcagttcccccagctgtaagacagggacggggcggcccagtggctgagaggagccggctgtggagccccgcccgccccccaccctctaggtggcccccgtccgaggaggatcgttttctaagtgcaatacttggcccgccggcttcccgctgcccccatcgcgctcacgcaataaccggcccggcccccgtccgcgcgcgtcccccggtgacctcggggagcagcaccccgcctccctccagcactggcaccgagaggcaggcctggctgcgcagggcgcgggggggaggctggggtcccgccgccgtgatgaatgtactgacgagccgaggcagcagtgcccccaccgtggccccccacgccccattaacccccacacccccattccgcgcaataaacgacagcattggcgccaagcctggccgcgtgtgattgcccgagacccgcagggcgtgcacccttcctgaagacagtggctcctgggggtggcaaaagagctttatttacacactgacaaggctcacggggtgtcagctgaagaagtaggtggaacgcttcacctgctccaggtcgaaggcccctgcggaggaagcagagcggacggcgtgggtggcgggaaagccccgccctggcccgcagttcgagccacccttgcgaggctgcccacccgcctacctggcttgggcaccgcctgcagtgtctccttcagctggctggcctccaagatcttctggggcctggggttggaagcagggtggggtgaggctgaggccaggttttggggtggggggggaatccaggtagttggggtcagggagcgccttactcagagcagaaccgcttgaccaggaatctggacaggtcctgcaggatgggctcgctgtgcaagcggacaaactgctcccggcacacctgggcaggagtcagaggatccccaggggtgatcaggcaggctctgggcaccacccctacccaacgccccagtgtgggggccccacccatgggtggactgaggctcagactacgggggcacctggttcatgacggagacatcagctgcgtgagtccagtaacagtcgtgcacagagacgaaggtcaggcccttcctgtggcagagcggaggactcctgaagggaggggagctcacagggccacccagtgaccagcatcctggccctgcgctcagccccctccacttgaggtccagggaagcccaccctcctgcaggcctcgccccacccctcgccccgcccctccccaaacatcctgggttaggtatcagtacagggggaggaaatgttcccagaagcctcctcgccccacccctgccgccccccacgctgctgtgggagcctcagctccgagggcggctacgaggtcccctcctgccagggccaccaccccgcatcctgagcattcccagctcccgtggccggtagattctgctggaacgacctccacgtgctccagatctaaccacacatcgcggtgccaagaaatgcccagcaggaaggggcagcgcccatgctcggctctccctgtcgggccacaggaggggagctgccaggaccacctacattcggggcacacagcctcagggcctctacacaggccccacagacacagcagatccactctgcccagtccctgcccccagctagacccagccttgccagctgtgccctgctagccagaagacgcccctgggaggcgagcggcacccacgccgtccggagacgcccacctgtagcagtgcagggcggtgagcatcatgtgggaggagtccagcgagtggatgaagttgggcgggaagccgttcttctgcttacgtgtgttgggctttctgaggacggaacaggtgccggtgggggcggcccagggacacccctaactggccgctgtctccaccgtggctgctctccagacccccggccaggccccagcccgggccccccactcaccggctgatgtctccgttgtgggtgtaggtgatgctctgaattccacctcctatttgctaaaaaggggaaggggccggtgagtcccacccgaggcccagcacggtggtggtacattgaggtggtggtacactggggtagtggcacgctaggatggtggcacactggcgcgggatggggtggcacactggggcggtggtacactggggtggtggtacgctggggcactggtacactgggacgctgttacactgggatggtggcacactggggagggatggggtggtacactgaccttgaccttggagtccaggcgatagggctggatgacggggacgcccaggggtgtgacccactccaccacagagcccatgtgggagatgaggcgggcactctcggtcagccagtgctgtgggacacaggccgtctcagggcagggggctcaggccggggatcccgtccacttgcttagggagtcctggccgagcggggacaggacaggacgtacctggatggcccgggtccccgagaacatctcctgtagactcttgaagacctggcgtacgagatagtgagaggcctcccacacgaactcctgcagagggcgggcagcaggtgcaggtcctcaggggctggcccgttcacgccctactcccccctatttcagagccactgaggcccaaggcctagggcctagcaggggggcaggggaatggggcctggcgcccacgcagtcagcaagaaacgcccaagccctaacaggcagccagtggtctgggggagcagccagggctcctgctgggaggctgggtcgggggcacacccgtctgagttttaaatggcagtgaaaccaacgtgttcgcagcgcgacatgcctggcgcacctggggaaagtcgctcagctcccggaggcgcttctcaatctgcaggcgcccgccatagcgcgtgaccccgtacaccaccgtcatcaccgtctgcttcaccaccttgcgggtgatgaaaccttccagcacctgtgccacccgcatgccccgctgggcgtcctgcctacggaacacctccacctgcacggcgggtgggccgggggcgcgggtcagccccgctagcagcccaggggccaccaagcacccatgaagcccccgccccagccccaccacatcctcaggacaggccaaggtgagggcacctggggccgagactcagggctcacattgcccccacgccgagatgcccccgggcagcagggcacaccctacctgcgcggccacgccgctgtacacgtcctgcggcacatccgagggctccaggttgacggaggcggcgcccacgctgtcgcggcccagagcagcataatgctgcaggccgttgcaagagccgtcctgaggaaggggcggcaaacgggagatggaagctagagaggcagagacgtgtgggaccccaaaccaccccccaggtcgagccgttcctagggccgtgcaccccccagccaagtgcaccggagcccccgcacgctcccgggagagaccaggagccatggctcccgcacactctaggaccacctccagagaataccacgagcgaaggtgaaatctcacaccctcaagtcgagccccaggcccagtgcacactgcacggcctcgggggccagacccagctggctcacctgatggacggggaggtgggagacataggcggcagggtcggaggcgcgcacagcgttcgccacctccatacagcaggccagcgtctgccagggttcctccgcgcccatccaccactttcggccctgcggggacagcggatggggggcagtgaggcccgggcccgatccctgagcccgctgggaggctgtgttgcggggaggtgggaaatggggaggagacgcacacccgtgatagtgaacacgggacgcatgtgggcgagagacggggcggtggctggatgagttctccatagccacggatggaggatgggagctgcgggtggaccgggctgaaacaagcgtgtccggagctgccgggggaggagggtggacagaggacctgggggcgccgggggaggaagcagctcggcggatgcaggggaggggggaacgtggggaacgcgggggccctggggcaggggagaagggagaagcaggacgggcagggggcgcgggggaggagagcgggcgggggacgtgggggcgccaggggagggggaggggaggaggaagacgggcagggggcgccaggggagggggaggggaggaggaagacgggcagggggcgcgggggcgccgggggagggcgcgggggcgccgggggagggcgcgggggtgccgggagggcggggaatgcgggggccccgcccctaccgtcaagggttggtccgcggagtccaggatgtcatccatcacctcctccgcaaaggccaggcgcttccgcagcggctcccgcttcttcaaccccgtgagattgaccaggtggatcttgagccaatccaggccgtgcgggccgagcgggcggccctgggcgaactccagcagggcccgcgccacgtcgctgcccaggtggttgaagtgcggcgggcaggggtaggtgcggccgcggaagtccatgttgtgcggcagccagaagacgcggtcccgcaggtgctgcgccagcgagaggcggtacagcgcctccgcccgcaggctgtgcatctcccgggccaccttctggcagtgcgccagctcacggcgcagctcggccttgcgggcgggcgcggcgctgtgcggcaggtgggcctcgggcggctggggcgcctcggagggcggggccggcacgcctagctgggggcagcccttggcctggaagagctgcagcaccaggtccagcacgcgcccgttgacgcgccaggcgcagttgcccagttgggtgagggcgtccagtgcgccatgcagcgcggtgggcgggcaggtttccagcagctcctggtgctgcgtggcgccttccaccgtgcgcatcagcttggtggggctgagcaggaaagcaccagagtgcggcgatgtccagggcagcggggggcaaagcatgggtacatccaccgcctcgaaggtcagcgtgggctccgcggccttctccagcagctgcacgtaggccgggtgcggcttcaggatgccgatctggggtgcgacaggcagacgggtcagggccccggtgctggggctttcctgttcccaccccttaaacttgggtgagaggggccggctccccggccaacaagaaaccagtgtggcctcccacgaacagaagccacctccagaaacggccggacacctgcatggacacccatggtgtgtcccgagtcctgggaggtactgacggctgcgctgagatcaaggctccgcccaaaggcgccaaccccatggggtccctggtcctcccagcgggatgccccccagctcaggagggcactgcctggcacctgctggacgttgcggaaggaatacacgtggtagagcacggggacaagccgagaggaacgatgcggcttgtccaggctgcatggcatctgcgtagcctgcaccagcatctccgccagcagcttgcccagctccatctgcactggcaggggccagggctgctcccgcagggcctcgggcgcccccagctcctcccagtactgccgcggcaggcagggctcgggcacctgtaggacagggcggtcagggcgctgggcaccggggcccctgagctagatgccccaccgcccgtgcctgacgcccggtggggcatctgtcagcccaagcatacagatgaacagactgaagcttgggtgcaaacccggctgctccagggagggagagcgcccacccaccactggccccagccaggaggagagggggtgcgagcctcacctcggcgtcggaggccagcaagcagaggtacttcctgtagtggttctgcagcgcctgcacctggccactgacccgctgcctctgcaccacgtgccggctgaaagtgcgcgcactcagctcccgggccagggtggtgaaggactcaccttgggcgggcagcgcctgcaggacctgcggaaggcagccgtgagtgcctgcccgccccgcccggggacccggccgcgcggaggaagacgcacctgcaggagcatccgcaccacctcgcgctcgtccagcaggcacaggaaggggtaaagtgagaaccggccctcgtacacctcgcgctctaggcggttcttggtctcccgcagcgcccggcacagtgctttctcccattggtcccgcagggtcttcagggtcttccgctgcgggggatgaacgggcccggtgagccccgtggcagctggtgggacccaggctcacaggacgggggtcaccgcagctccctgcagagacctcatggccctcaaggtccctgctgtgtgttccgggtagctcctcaccccggcctgccctctgccggcttcagcgtgcctgacgcagccaagagcaaaagcccagctgcagtgtgcgcagaagcacaggccaagacccaacctcgggaccccacaagttttccctgagcggcagccaggctgagttcctaggccctgcatgaccagaccagggcatgagcaattcaaccgcatacacggagctcagcccctgcggcggacacgcgaccccggctcagcccctgcggcggacacgggaccccggctcagcccgtgcggtggacacgcgaccccggctcagcccctgcggcggacacgggaccccggctcagcccctaccgcgtgcttgacctccttgcttggcaacgtgggcttctccacggacaccacgcacaccctgctggccagctccatgtggagctgcttctcaaagaggcactgcagggtcttcaagggcaggtgcagcttcgggtaggacacacgcccatcctgcagggatgggggtagtgaggttgggggcttgccagagggcgacctgccctcccaggaccccgagacagcatgggtgcacgcgtttctgcgtctcctgcaagttgctggtggctatcgctgacgcggggaaaggcgggctgcgggtaaagtcagtgccagcagtgcaaaccaaaggccttgaccctcctggcctcgacccctctagaagggacactgggcaccgtgcagggggtggcaggggcggtgatgctgggagctggcagagcctggggagaccgttcactgcacccccagatgttggctgttttctcctcaaactcagaactgtatgaatgtgacccatccagaaatagatgaattaaaaataacaactaaagcctagcgctttgagaatcaaagacgcacgtccacataaaagcttgtacacaaacgttcacagctgcatgactcgcagtcgataagtagaaacagcccaacgtcccataaacggacgaacagacgggcacggcgcggccatccacgcaccggagcatgactcagccctgacccaggtcgcctcccggaggcaccatgaggacgtcacgctcagtgggagatgccaaacacaaaaggtctcgcagtgtgtggtcccatttctatggaatgtccagagcagactcatccacagatggggaggggatggggagtgacggggatggggacgaggcttccttttagggtgatggaacattctagaattagacaaccgtgactacactaaaatcgctgaattacacctttaagagggttttatggcaggtgaattacacctcagtaacagacgagcccactgcgtgcacctggcagccccactcaaacgcactgctctcctgtcaccccaccctctctctgcggcccccgaccacctcgtccccctgagcccacaccctcagggccaagaccctcccagctctgggtcctcccatcttctcagaggaggaagggaggaattcagggcccagcccaggtgagccctgggcaccggggaggcccattggtctgagctgaggctccaggaacccccaaagggcagctataaggactgaagtctgccggggcccacgtgggctcaccttggcatacacgtccctgagcagcttggaggtgttgaccgggggcggcagctgcggcgggaggctgaaggtgggcttcaccttgtgcacggccttcagaacagtggcccgatcctcctcagacagcagaacggcggtgaagagtgcctgcagcttcagcccctcctggctcatctgttccagacacctgtggtgcaggcggcctgctcgagggacgggccagccccacgctgggcttccacagaccccaggggaacctcgtgaccacctcctgctagcctgcaggtctcggtgtggctgtcaggccctctgggggtccccagcccccagcccaggcaccgtcccagatcttaaaaccctgggagggacatggtggggggtgggggccctcccgacaccacctacctttcgatggtcccggcgtcctggtcctgcctccccatgcactggagggcagccgcataggacagcaggtccggagtcaagccggcatccttcaccatgaataacacatataccagctccttgaaggcaccctgggagaccaagccagggtgagggtctggggggatggcccaacctccacatcctccctgctccctggagaccccttctctgtagccaccagctcagcaggggacagggtcaccaggcaggagtggccagctgggcagaccgatgcatccccctgaggttctgacacacaagctccacctgcagaggcagccgcatggcccgccaggtgggactgtgggaggttcacgttcctctgggaggcagcttgttaaacctccagatttgtcaattgtgtggatcttttcaaaggactgacttggcttgactgttctctgctgtttctgccttccatttcatcgatttgttttaatctttgtaacttcctctcatctacttgctttaggtttagtgacagcttcttcttctagtttcctaaggtgaaaggtgacgtatttggtctgagatgtttcactttttttccccccaagatggagtcttgctctgttgcccaggctggagtgcagtggcacaatctcagctgggccgggttctctgcctcccaggttccagcacttctcctgcctcagcctcctgagtagctgggattacaggcacacgccaccacaccagctaattttttgtattcttagcagatacggggtttcaccatgctggccaggctggtctcgaactcctgacatcgtgatccgccagcctcagcctcccaaagtgctgggatgacaggtgtgcaccaccgcgcccggccatcacctttccgaatataggcattttgtgactataaattaccctgcgagcactgtgtcagctgcatcccaggacttctgacaggtggtgttttcattttcattatctccaagtgttttcgaac[140 bp omitted]gcctcagcctcctgagtagctgggactacaggcacatgccaccacacccagctaattattttgtatttttagtagaga[141 bp omitted]ttttttttttcatttaatttttggccaggcacagtggctcatgcctgtaaccccagcactttgggaggccaagacaggaggatcacaaggtcaggagtttaagaccagcctggccaacatagtgaaaccccatctccactaaaaatacaaaaaaaaaaaaaaaaaattagctgggcgtggtggctcatgcctgtgctccctccactaaaaatacaaaaaaaaaaaaaaattagctgggcgtggtggcacatgcctgtaatctcagctactgggagcctggggcaggagaatcacttgaacgcagaaagcggaaattgcggtaagccgggatctcaccactgcactccagcctgggagacagaaactttgctgtcgacagacttggagactctgtcttaaaatatacacacacacacatatatatatatatataaaataacatatatatataatttttttcttgtattcatttttcctgacatccctgttctgagcaatttctcctttgacccagtggctgcttaagagtggcctgtaactgtaacagactattccaaagggaaaaaaattcccttacatcctcccaccccatagtcctgcagctgaagacatgctgtgacatgaggtggccacacaccagaga[137 bp omitted]tgcctcagcctcccaagtagctgggactgcaggcgcccgccaccacacccggctaattttttgtatatttttagtagagacggggtttcact[136 bp omitted]cctcactggccacacatagtccttaaattgaaatattcagttcttccctttcaccagcttcaagtgttcagtagcacacacagctgttggcagatgcggaaaattcccaacatcatagaaagttctactggatggtgctggttagaatacgtggccgggcgcggtcgctcacgcctgtaatcccagcacttagggaggctgaggcgggcggattacctgaggtcaggagtttgagaccagcccggccaacatggcaaaagcccgtctctactaaaaatacaaaaattggccgggcgtggtggtgagtccctgtaatcccagccactcaggaggctgcggcagggagaattattgaacccaggaggcggaggctgtagtgagccgagatcatggcactgcaccctagcctgggcaacagacagagagtctatctcaaaaaaaaaaaaaaaaaaaagatagaagcaatgccttagcctggctaacatgctgaaaccccacctctactaaaaataaaaattaaaacaattatccgggggtggtggcacacgcctgtaatcccagctgctcgggaggctgagctcgcagtccagcgacatccaggactgctggccaccccggaacgctgggagaggcaggaggggcccctgctagagcctctggagagacttcgggtctgcagacatcttgattccagacttctgggctcgtgctaagagtgcgtttctgctgtgcaagccgccaggtttgggacactttcgtaggggccgatcccaaaagcgccctgttacagtgtgggctctctgcccagggaatccagggggcttgtgaccttggaggggaaaatacacgaccctcatcctcagtcctcccggagtctggcgccccctgcagcaaggaggaaccaggcagcacgccgcctccacctcgcggtaagagcactgcggacttcaccgcaagactggccccacctgatcctgaatttcgctgtttgatgcgttaataaagaagcacatcaagttctctaccacgaattggtcttaatattgcgatatctgtattttaatataatagtatcccatgtttacccaaatattaagagaagcttttactgttgtttctcaaattagggctgaaggatcatggggggggagaaagctgggaacgtttgctgctttgaaagggtgtgtaaacaacaccctccaaaacaaccaagagttccgaggagaaactttggccggatacggtggctcacgcctgtaatctcagctcctcgggaggctcaggggggcagatcacgaggtcaggagtttgagaccagcttggccaacacggtgaaacccccgtctctactcaaaatacaaaaattaatcgggggtggtggcgggcacctgtaactccagctacttaggaggctgaggcaggataatcacttgaacctgggaggtggaggtggccatgagccgagatcgcaccaccgcactccaacctagtaacagggagagtatgtcccagaaaacaaataaataaacaaacaaaaagaaaacggcaagggaaattggaaaatactccagatgaaccacaacgaagatgggtgggatacatctaaagctgtgctcagagggaatgcggcgccagtgaacacccacatttcacacagaaggatctcagcacagcagcccgaccttccacctcaggaaaccagaaaaaggagcaaagtcaaccccaacaccaaagcctcatcctgacgagggctctgcaggctgccccccgacgaggccaaaagcacccctgcccagacagattcacgagccccgagaaagaacggaaggaaatgctcaaggcattagcagaatttctccctacttttttggtcattttcaaaatttgagagtcacacgtgatttgtatttgaaaagcctaaaagaattattaaaataaaaaacaaaggacttgaacctgggggctaagagagaaaagtccagtctaaatgagggcaagttcctgtctccaacgaccagggcaggtggcccggctcccggctgcactcacctgccgcgcccagccaagcatcacggcgttgtacatgtccagcgtgagcagcttccgcttctgccgctggccgtggtggacgaccagcaggtggtgggcgaggggcagctggtcagtgagcaggcagcacttgaagaaggccaggagcctctgctgctgacctgagagctgggcctgcgagtgctgccccgacggggcctgctccacatcgaggctcagcttcccaggggcctcctgcagcagccgggccagctgctcctcccaggggctctcgggggcctggcgcgtgcagtcctccaggcacccggccatctgcttgctcaggagccggggctccacctgcaggcgcctggtcagcgccttgaactccccgctctggaatggcatctgcagcttcgccttcaaccgctgcatacgcatctgctgggtccgcttatccttctccagtatctttgcccagcggccacagggcaccggggtggcatccttggcccccatctggaccttcctgggtggctggaggctaccatctccactgccacattctgggagccgcgccacatccaccctgttcaccaccacctccgacacgctctcagcctgcagctgccgcacccgcgcctggagcactgtgaggggcagaaggcgaggacatgagagggaccccctccccattcgagcacccgtctctctggaccctgagccaggccaggaggtgcaggtggctgagctcgctgggacccaaggcgtgaattcctcatacttgccaacaacgttgtaaggtctgcccgctgctttccagacacacgcaccccaccacctccgcacctccccacccgagcctcacagaactcagcagccctaacaagctgccaccgaaacctgcagcaccacgtctccccggtcactggccgctcagaccctccaggtgcacaggcccagaacccggggtctgtgacaactccctccgtccacctctcagtacctcctctgggcttgcctccagaatctatccaggtggcccccgcctcccctgcccctctcactgtctagctcagggcctctgcacagactcccaggaccctgaaccgcccactccctggctcaaccatggcctgcaagttcgcaccccgcctcagcaagacccccccagctggtggagctgccacacacacactcctaggctcccagtgtctacaccggtggacgctgagccactagctcgcagggaaaacgcggctcctgctcgtgccgcctcaggttgcatttttgccaaccaatcaatgcctaagtgttctgtatctctttaaagaagccttgttggaaatctattgctggccgggcatggcggctcacgtcggtcatcccagcactttgggaggccgaggcaggaagatcacctaaggtcaggagttcgagaccagcctggccaacatggtgaaaccccgtctctattagaaatccaaaaaattagctgggcgtggtggcatgtgtctatagtaccagctacttgggaggctgaggcaggagaattgcttgagcctgggaggcagaggttgcagtgactcaagatagcgccattgaactccagcctgggcaacagaacaataatccatctaaaaaaaaaagactgttgaaataagccgggtacagggccgcgcacctgtggtcccagctactccggtggctgaggtgaaagaatcacctaagcctaggagttcctggctgctgtgagccgtgatcaggccaccgtgctgcagcctgagagacagagcaggaccctgtctcaaaaaaaaaaagggggggggggacccaggtgtccagatgtggtggctcacgcctgtaatcccagcactttaggaggccgaggcaggcggatcacgaggtcaggagatcaagaccatcctggctaacacggtgaaaccccgtccctactaaaaatacgaaaaattaaccgggcgtggtggtgcgcgcctgtagttccagctactcgggaggttgaggcaggagaattgcttgaactcgggaggcggaggctgcagtgagccaagatcgcaccattgcactccagcctagcaacagattgagaatccgtctcaagaaaaaaaaaattgctgaaataaaaagacaagcgtgatgtccgccttcagagtgctccaaaactcaggagatacttttaggattaacagttgagagctttgttttgttttgttttgtttttgagatggaatttccctcgttgcccaggctagagtgcaatggcatgatctcggctcaccgcaacctccaccttccgggttcaagcgattctcctgtctcagtctccccgggttcaagcgattttcctgcctcagcctcctgagtagctggcactgcaggcgttcaccaccatgcccagctaatttttgtatttttagtagagacagt[151 bp omitted]tgctgggagtacaggcgtgagccaccg[140 bp omitted]taatggacgcagacaggatgtgggacagaagcaccggcgggaagcaagcacagggaagctcccacctccctcccacaccaccagccaggccaggacgagggcctgccaccgctggagcctgggctgtccctcccaagtttcgcagtcatccagtctccattaggcgcctaccccccagagccaagccaggacagctgagtcagttcagggttcacatcctggctctgcacatgtggccttggcggcggggccggggggggggtctctccagacataatcttgggcctcacctatgtccctggaaagtgggagcacctggtggggttctggggagggggaattacgagagctccaggaaggagcctgctcagcaaggacagggcccatgagcggtgcaagagatgtttcagcaacgccgtctgggcgtgtcctgggacccgagaggtggagaccgccctcagcctgtctcagaatctgagcctttgccttttctcccggcagcagggagcggactctcctctcccgggccgccgtgggggtcgcgctcaccctccagcagctccacgtggccccagtccttcctgcggtcttggtcttgctcctgggggctggcggacgagctcctcctggggccgcagacgccaccggcggtccctgcgggaaagacgagagcggctgagcggggccgggcgtgtgggcgggggcctccataaaggcagaagccgaagggtcgaagggcaaaggagccctaaacgcagcggaaactctcggagcacgggcttaagttggaaagaaactaagacagcgaaggtggaagggccccgccgcggcgaacacgggcgcggaaccgccgagagagggttcctcgcactcgaggtgcagcaggtcaaaggttaagagccctaaacaccacacctggggtcaggaggctgcataagaaaccacgagtcaaaggtcagactgcacggaggagcctcagtcgaaaagcgggcaagggcgagtggaaagcggggccgggtcggtgggctgcgcacgcccaggtgcaaagaggcaaaggtcaaagcgccaaaggccccggccgcgcggggaggagcccacgccgtggcccccgggctgcctggccgtctccctttgtgttaccttctttgccggggagtcccgggcggccgcaaggccgtagggctcgtttgagccccgccgctccgcggccccagcaaagtgccgacattacgcacgccgctccaggccaccccaccggcccgcgcctgcgcatgcgcccgcgccgcctgccgggagttgtggtttcatggtcgacggaggctgcgaagggaaaccccagccggaagtagactcccaggatgcagcggaggcgcgaaggcatgcgccggtggacgctctgattggttcctcctgctgtttttaaagggagggggcgggacagagctgttgccgtggcaactgggaggcactctcaggctgttttcccgaggacctcaaatccggactttttttctgtttttctttcttttttggttttgttttggacgcgttgtggcccaggctggagtgcagtggcgtgatcatagctcagtgcagcttcgaactgctggggtaaagagatcctcgcccctcggcttcccaaagcgctgggattgcagacgccgccaccgtgcccggctttttttttttttttttcaaggcatactcatctaataacgaggacagcatctgcaatttagagattcctgtccgcaaccttcattgctccaacgacaacttttgggtaagagtcattaggatgccgtctatcatggaggaagctgaggctcagagagggccaccaagttgctggaagacacagcacgtgcgacctcagggaggctgcaaggagagaaagccccagtccgcgagactcccagcctccagcttcagtttaccctccaatccccaagccctcaggggcaggagccgaatggagcggcaggcttggattcacctgctaagtggggtgaggtcaagggaatgaaataaacctcggagcctagagcctgccctggtctccgcgtgatcctgcctaggaggagcagggcgggagctttagaatggaacctggaaggtgtgcccacctgtgtcgttcagccggggcagcaggccagaggcgggagcgcctgctgtggggcagtaggcttgggaagggtgagaataggaatatctgggggtaactgtgttccaggctaatatcccagttgcaaaggggagctggtttggtggctcaggcctgtcatcccagcactttgggaggctgaggcgggcggatcacctaaggtcagagttcgagaccagcttggcaaatacgcaagcatgcctggcaacatggcaaaaccccgtctctagtaaaaatacaaaaattatccgggggtggtggcgggcacctgtaatcccagctactcgggaggctgaggcaggagaatcgcttgaacccgggaggcggaggttgcagtgagccaagatctcgccactgcactccagcctgggtgacagagcgagaacctgtctcaaaaaaaaaaaagtgcaaagggaggtcagttcagtgcctcaggcctgtaatcccagcactttgggaggctgcggcgggaggatcgcttgagcccaggagttccagacaagccttgggcaaccgagatactgagacccagtctccaccaaaggaaaaaaagaaattagccaggcatggtggtgcacacctgtggtcccagatactcgggaggctgaggcaggaggactgcttgagcccaggaggtttagactgcagtgagctgagatggcgccactgtactccagcctgggttgacagaacaggaccctgtctcaaaacaaaacaagtgcaaaggccctgaggcaggaacaagcgtggacagaggagcaatttgagcagagtggggctggggagagggagcaaagatgtagctggggctcagttagggggcctgaccacacgggggctcgggggcctcagctcaagctatcctccatccccaaaccctggcacttcagtttccccatcagcccagaacgaggactcgacctcactctggaagggcctggcagcctccttacagcacattccagacgctgctgccgacgcctgcgtgagcgcactgatgccaccggctgggaatgttttcgacagacggcagcaccctccctcacctgcctcagtccacctcagggtgccccagcgggctgtgacctcagacctcacccactactggggtcacctgcctggccctgaatcagccaggcctggtgtgccaagacctacagacaccccctgcacccctgcaggctggcagagccagaaacttgggtggaaaccgacttctgaactatttcaccattccttatgcgttagtcttttcttttatttgatgagatcccagcactttgggaggccgaggcgggcggatcacgtgaggtcaggagtttgagaccagcctggccaacatggtgaaaccccgtctctactaaaaatacgaaaattagccgggcatggtggcctgtgcctgtaatcccagctactcaggaggccaagggaggaaaatcacttgaacctgagaggtggaggttacagtgagccaagatcgcaccactgcactccagccttgggcaatgtagccaaaccccatcactacaaataatacaaaaaaattttgttggctgtgatggtgcctgcctgtggccccatctacttgggaggctgaggtgggaaga[135 bp omitted]gtttctgaaacagctcattgcccaaattccagcctcgcaactctgtagccgccaccaccccccagccccaccatttattttaactacatctgtctccaccactcctgtattaagtaaatgcaatattggctggtcatggtggctcatgcctgtaattccagcactttgggaggctgaggcaggcagatcccctgaggtcaggagttcgagactggcctggccaacgtggtgaaaccctgtctccactaaaaattcaaaaattagccggacgtggtagtgggtggtgcctgtaatcccagctacttgggaggctgaggtaagagaaatgcttgaatccaagagactgaggttgcagtgagctgagatctcgccgctgcactccagcctgaacgacagagcgagactccgtctcaaaaataaattaataaatacaacattaattatttttcttgcttaagttttacgaagagacttaatatcaccatcaaaagtgggaaaccatatatctggccgggcgtggtggctcccgcctgtcatcccagcactacgggaggccgaggcgggcggatcccctgaggccgggagctggagaccagcctggctaacatggtgaaaccctcatctccaataaaaataacaaaaattagccgggcatggtgggtgcctgtaatcccagctattcaggaggctgaggcagaagaatcacttgaacccgggaggcggaggttgcagggagccgagatcacaccactgccctccggcctgggcgacagagcgagactctgtctaaaaacaaaacaaaacaaaacccaaccaagcaaaccccacagagtcgagaatcgctagatggaaggggatggcccaggtccctggagcccctgtgacaaattaccacaaactcggtgccttaaagcaacgttcattttcttacatttctggaaatgaaaagtccaaaatcaggactgcggggctgaagtcaaggtgtgtggaggcctcgctccctccagaggccctggggctccttcctgcctctcccagcttttgaaggctccaggtgtgcttggcctgcggccacatcactcccgtctcggtctctgtggtcgcactgcagcctcctcgtctgcctgtgtgaaatctcctcctgtctccgtattgtgaccgcgtttaggatgccccaggacaatcttctccatatcgttcagatcttcatggtgtcaatatattgagactctttttccaaataaggcaaatgtcacattctagggatcagggtggggacttacctttgggccaaccacagaggctacaaagaggaagacaccactcaatac[137 bp omitted]agattctcctgcctcagcctcctgagtagctgggattacaggcgtgaaaaggagcaaggctctgccccagccacagcgcggatgcaccttgaggatgtcatgctcagtgaaagacgccagacacagaaggacacacagtgtgtgatcccctttatatgaaatgtccacaacaggcccatccacagaggcaggaaggggatgtgtgggtgccgggggctggcagaggggatgagtgacagctgatggggcttcttcttgcggtgatggaatcttctggaactagacagtcgtggtggttgcacaactctacgaggtactaaaatcactgaactggctgggtgcagtggctcatgcctgtaatcccagcactttgggaggcagaagcaggtagatcacgaggtcaggagtttgagaccagcctggccaacatggtaaaactctgtctctactaaaaatacaaaaattagctgggtgtggtggcaggtgcctgtaatcccagctactcaggaggctgaggcaggagaatcgcttgaaccagggaggcagagtttgcagtgagccgagatcgcaccactgcactccagtctgggtgacagagccagactccgtctcaaagaaataataataaaataaaatcactgaactgtacagtgtaagtgggtgaattgtgtggtatatgagtgatgtttccgaggtgtcattaaagaaactcagacgcctggggtggggccagtctcaccgctgtgggtcccatccccatcatttctcacaaggccctcagatcacccttccgcggtggggggcggacactctaagaagggaagacctgggctcctgctggcgagaaggcggtggacatttcttcagtgtctggtgccgcgccctctgcccagcgtgctccgtggagggtctcattgtcttcctccagacgtctctttactggcccattttacagaggcggaaccgaagcttggggtgttggccacagggctctagtgtgggaagccaggccaggctggacctcagccatggggacccctgtccctgagactgtggcacctgccacaccctctgtgtgacccgcctaagccaggaagagagggtcaggagatgcctgagccaccaagaaggcatcccagcgtccagccagaccggttatccctccagagggctccccggcaggacaggctggtcgccatgtcttcagcctggtgctatttaaaggtgggtgccacctggggctgtggccgcagggccaggactgggctgctgggagctgtgtccccacagcggaggtcgccgcccctctcaggcctcggtttccccagttgtcaatgcctccacttggctgtgagtctgtgagggtcactgtgctcaccttttggggcccagcgcatggggcaggcagaggaagggtgggggccagccgccttgctgggtggttccccgtggggcctggggtatggctctaagggaggagcaagtgtgggtgcgaatggggccgccccattcctgccgcctccgacgtgccccgccagccggccaccgacaggtctacgtggctatcctccctcctgcccacctacctgcccaaacacacgtccccagtcgtcacctgcccacccacccgcgcattcccacacccttgtgggcctggctttcgggaaactacaatttgcggggagagaagtcccacgagggcatgccccggagcctggctggtcccacggctgacgcacgcggcaggacctcccgtgtccatctctgtccccaagcatctccgcctctgcccctctctgtctctgtgtctctctcgtctctcccggtcatcttccttgtgtctcttgactgccgccgtctttctgtctctgtctccctccgggtctctgtctccctccaggtctctgcggcccgcgtctcacactcccgcccccgcaacccgaggtcctagcccgcccggggactcggctgactcacggacacgccccgcgagacaaacaacaaacgcgcggaggccgagcgcggagtcccgcacggccgcgcccctgtgcacctggcccccgcccccgagacgtcccattggccggcgccctagcctggtcccgcccaagtggaccccgcccccgccccgaggcaccccattggccggcgtccccgccccagcgaacccggccccgcccccgaggcgccccattggccccgccgcgcgaaggcagagccgcggacgcccgggagcgacgagcgcgcagcgaaccgggtgccgggtcatgcgccgccgcctgtggctgggcctggcctggctgctgctggcgcgggcgccggacgccgcgggaaccccgagcgcgtcgcggggaccgcgcagctacccgcacctggagggcgacgtgcgctggcggcgcctcttctcctccactcacttcttcctgcgcgtggatcccggcggccgcgtgcagggcacccgctggcgccacggccaggacagtgagtgcggggcggcgggggcctggggtggggaggcggcgggtgacggcaacgcggccgccgtcttcacggtgacctgcgcccgcgggggagtcccggaggctcctctgtgcagcctcggcctcagtttccgtggtctgtgagatgggtgcagcctgcctggtgggagggttgcactgttaaagcgaaggctgcagcggcggacccggctcaggggcagagaagcgtccgtgtggtacaaccctgtgggtggggccacccatctgcaggtgggaaactgaggctccagaggggctggggcaggcccagctgcatggcggaagcggcggggggctgacctccggactcctgacatcacagaatccagtcagggctgcctgagtcggggccccctctgcttcttcccagacaccccatctggcaggtgaggacaaggaggcacacagaagggatgggacctgcccagggtcacactgacaggggtggcggagctgggtccccacagggcccaggacgtcacggagcgggcgtctctgtccccagggtctgccgagcacactgaggtaggccctcagtgtttgtggaatgtcaggagcaagaggagaggctgggcacagcaggggatgtgggtacctggaggccaggggagtcggtgtccccgccgggcggggggcactgggaagggggcccgggcccgctggctgccgcctgaatcaccaccatcagggcaggtaatcaccccctgtccttcccaccgctttcatctgggcgccaaggccctcattaggccgcacgtgacgagggcggacaggggactggctgggccggtccatccatggcgggcatggccaggcggggtggcctcgggccggggcagaggcctggctccgctgcctgacctggaacagtctctgcctctctccaagcctcggtttccccagctggacggtgatgggggtgagggctagctgagggctctcctgcccttcgtgcattcgctggtcactaatcgggcaccttgtgggtgctgtgctccgcatgggggacccagtggtgacagagacgcccaccctcctggggctcccagagcagaggcgcgcagcagttagacacgtgaacaagggcgcag[132 bp omitted]cccgtctctaccaaaaatacaaaaattagccgggtgtggtggcgggcgcctgtagtcccagctactcgggaggctgaggcaggagaatgacgtgaagccgggaggtggagcttgcagtgagctgagatcgcgccactgccctccaccctgggcgacagagcgagactccgtctcaaaaaaaaaaaaaaaaaaagaacagtgaatgacgtgaacaagggtgcaggtgggtgcgcagaacagtgaacggcggtgttgggaggcaccttgccaggggaggggaggtgcagggcgaggaaggggccaggggagatcgtgacacagacgccccagaacaaccacctcaaagacgttcctgtgtgtcctggaaggtcgggctgggaggctgccccgaggagctttcactttgacagggagctggccgggcacgcagggaactgtacacccagctgacaaagcggcagacacccaggccggggtgagcgagtgtgggtgaggagtggcggctggccccagggtccttgctggacaagacacttcagctcagggtggggcagggctcacccagggctacccacagacgatggcgtccaaatctggctctgccactcccaggcctcaactggcccctctgcaacgtgggctgctgagcgggcttggtaggacagctggcatacagtcggcgctcaagcatgtctgtggtgtcccataaaccaccggtgtcccactctaggccactgccagcccggcctccagtccagagtcccagtccggagtcccagtgactgtgcgtgggccgggcagctgagctgtgagggccgggctgggggctccatatggggtggtgtgagctgtgagggccgggctgggggctccatatggggtggtgtgagctgtgagggccgggctgggggctccatatggggtggtgtgagctgtgagggccgggctgggggctccatatggggtggtgtgagctgtgagggccgggctggggggtccctggggtggtgtgagctgtgagggccgggctggggggtctctggggtggtgtgagctgtgagggccgggctgggggctccatatggggtggtgtgagctgtgagggccgggctgggggctccatatggggtggtgtgagctgtgagggccgggctggggggtccctggggtggtgtgagctgtgagggccgggctgggggctccctggggtggtgtgagctctgagggccgggctggggggtctctggggtggtgtgagctgtgagggccgggctgggggctccatatggggtggtgtgagctctgagggccgggctgggggctccctggggtgctgctggtcgctggctcattgacagttatcagtggtctgggtgggccctgccccttctgactcccacatcccaggaaccctttcccaaccttcctcgtggtgttgctgcccccctgacgtccgtccctctgggtgtgtgggagcccccccgccatacacacacacagatgctgctcttgggctgagctgcagggacagcgctgacctggccctcccacggggtcctcatcgatctctgcactcccccagctcgtgggggccgtcctgcttcccgttccctctgcctgctccttgctcctccctcacatgctggggggggctcctggtgtcagtcacggctctgggggatcctgagtgtccgtcgtggtcgggaggggactcgtggtcccgggggtctcctggtatctgtcgtggtcctgagggccctgcacgaagcacagcggacagcagcggtgctgggggtgagccagcaaggccctccccgacccccgcctcccccaggcatcctggagatccgctctgtacacgtgggcgtcgtggtcatcaaagcagtgtcctcaggcttctacgtggccatgaaccgccggggccgcctctacgggtcggtgagtgccgggcagggctgggcggcgcgggcagggtggggagggtgggccggcctcacccccgcccgcagcgactctacaccgtggactgcaggttccgggagcgcatcgaagagaacggccacaacacctacgcctcacagcgctggcgccgccgcggccagcccatgttcctggcgctggacaggaggggggggccccggccaggcggccggacgcggcggtaccacctgtccgcccacttcctgcccgtcctggtctcctgaggccctgagaggccggcggctccccaaggtgcctgggctggtggcgaggggcccggccacgcttgttcttccccctgcgggctctgtaagcgctgagtgcccaccgtgtgcgggcgctgtggacacagcccaggagccctccaggggggtcccagcctgagggggtggtggccaccaagcaggttcaatcctgagttggggacctcgaggacccaacagggcgcctctcgggctgaaggacgcagacgtcgaaaggtcgagggggacgtcccaggcagggcccggcagaggcaggggctcggggtggggagcacgttgggagtgggggcaggagcggaggggaggggagggggccggggagacggtgacagacgccgcagaacaccagcctcgaagccggtcccgtcccgggaatctgcaaatacaacgccttgcgaggacaaaggcacctgcaggtgggacggagatggaggagcatccagggtggggggtccagggccccagtgtcctcacagggtcctcacgacaggaggcgggacagtgagagccagagagagatggggatgggccgcgctgtggccgtgaaggggaggaagggccctaagctgagggacgtgggtgcctccagatgctggggaaggcgggaacggttccgcactggagcccccgggagggaccggcctgctcctgccttgatatgagcccagtgggacccagtttggactctggcctccagaaccgccagaaaataaacgtagtaagccatcaactttgtggtcttttgttacagcagacgtcggaaatatgcacacggtgtctgaaactgttctcatgacaaaataagcctcagatcccccggggaagggcggaggccaacgcctcggtgttcctccgatcccccgggaagggcggaggccgacgcctcggtgttcctcggatcccccgggaagggcagaggccgacgcctcggtgctcctcagatcccccgggaagggcagaggctgagggcaggagccgtgctgggtgcagggcaggcctgggggcttcatgccgctgtcctgcgggacgcagagagggctggccgtcggtgtgggggcgcccccacctgtgcccagcgccctcctgacatcctgactccgctgggacttctgcctacagccctgggagtcaaactccagcctctcagagaaaaggtcagagccaagagccccacagcctggagccaggcagtgacaccctgggcctgtctccccttctgtgtgtggggcgacagcagcatcgccctggtgaagtccccggggacggccagggctccatccccagccgccgccttccacataaatacaggaagactgggccgaggcacttgctgggaggtgctgagcagcctgacacggaaaacccttctgggaagggagggtcgtgcccggcccgagagcttctgctcaccctgcagacagaagcgagccccaccccaggggacaccaggcggcctctggggacatctttggctggcatggagtgggtggaggacagggctgcacccaggatgtccccaggttggcagtgtgaggggagatcggcccacgttggccagtcggagggcgtcgccacttgagttgtcactgggagctgcacaggtcaccacagctgaaataaaacttgctggcaccccacgcaggaacgtaacatg[151 bp omitted]aaaattagccgggcgtggtggcgggcgcctgtaattccagctacttgagagg[144 bp omitted]tttctaaaacagagcgtggaatgggcgtacagctccgcacatcccagggcagtgaaatcccggttcacacagagccctcagcagcttattcgcaagcccaaacctggggacccccgttgtcctcaggcagtgaggtgggggccccccaacagagaggagcggcctgggggcacagaaccagcggctccccaggaaatcgccagcagtgaaaataagacaaccccaaactgttgcaaactgtgcttccgcttacgaagcactcctgagcggcagggcggatggggagagggcggctgcaggcgcgaggggcccggggacgcaggggtgcgggccttaccagggccctgtcctgtcgtgcagcaggctcctggggcagggaagacaccaggggcggccacttcttactgctgtctgacctcgagcaatgcggcctcacagcccccaccagggtgccggtgtcctctgggcccagcgcccccgaggctcatgcctgggtggggcgaaccaatcggtcctgctcctctggccactccacgcgagggaagtcccagcctcacaggcaggcgcacaccccggcagcatctctgacaaaggccctccagttccgagtctccaggtcccgccgctgcaagcctcacctgcccagccctcctctccagctccaactccaactcccaagaaccaccacggacacacagaacccgagccttgtctccctcaacgcctcctgactcaaaactccatcttccaacaggaaaacggctcggccgggggactgtgacccggagcaggcggcccagcctgtcgcgcagactcggggcctaaaacacttgttctctcagtccggagatcaaggacgatccgaggtaacctccctacctcggtgtcctccatgcaacctcgtcttagggcaccgggtacgttacctcgtgaggagccgagtccgcgggtcctggggttgagatgtggacgccctcagggctggcactctgccctggcggccacagtcatggaagtcccaacgcttctctcggctccgcaaccccagagggcggccacgaggagggcccgccacgcacgaccccagagggcggccaccaggagggcccgccacgcgcgaccccagagggcggccaccaggagggcccgccacggcgttgcggcagcagcccagaaggtgccctgcgcacggtccggacaggtgggatccgagttacctggccaagggggctgacgcagacacgtcgcgggacacagtgaagagtgtggtgcagagcggagggcgggagtctttggagaacaggtaggggcgtggggcacgcgcctcccacgcgcaggagccgtctaccgtggagggacacgggtggtcctgctggaggctcctctccgttagctgtctccatcgtctgattcttggatcccaggatggtgggatcatcagcaactgagatgaacccactgccccggccccctgagcccgcaggtccccacgccttgccagctgtgcccgagctggctgcaccccgggccaggcatccagcaaccttgagcagtggggtccggcttttcagaaggggccaggaacccgcgtggctgaggtgtgaccgaagcgtggggcagaggcgctgggccctggcgctttaacgctggtgtttctggttttaaatttcacgacccagtgacactgccaccctgctacctcgccagcagccctcctgggcttaacttcgggagagcagttttgctagccggccctgggtgccaagccctgcaggaggcgcagacccctggagacaggaccggactctgcagagcccgaccagcctcccagcttggccttttcctgacgcacgggcgcagaaggaaagccacagcaccggcttctctttgtaagtagtgtattttaaatagctttcaagatacacatattttttcctttaaaaaagtctgttggagcagttttgttcttgaattttgctggtcatcctcatggtcccgagcccccctactccgggtcgtggaggcggccgagggggaggctgggggcccacgtggcccgtcctggcggcacctgcagcactgggggagccgctgaaccccgtgcttcagcgctgggggagccgctgggccccgtcttccgccacaaaccatgcatggccgccacgtgagctcaaacgtccgtttatttcaaagcagtaataatttaaaattataaaaatctttccaccgctgaacgtttagagggtgaggttagacagaggacggggaggctggggacgccccagaggggaccatgtggcccacgccttcccaagccagggggccggtgggccgggcccgggtcctgccctggaacaggcgggacctgcagcgctgaccagccaagcgtggcgccgccggggcacccagtctgtgggtgccgtgtggcgctggctgagggtgggtgggaaaggccccgtgctttcccgacggccgacgtgggctcacgagttgcttgtggcgttctcgttgctgggcgagctggaggaggacgatgacgacgaggaggagaagctcaccccagtgaggccaggggggttcgtggccgtgttctgtcccgtgaggctttttcggcagacggggcagctgtcgtgctttgtggggacagaggcagggacgggagaaggggcaggttagaggcgggagggccgcggtcggggtgggggggcgggtgggcggggcactcacctgctccagccagggcacgatgcagccgtcgtggaacaggtggttgcagggcagctgccgcacacgctcacccagcgcgtagtcgtccttgcacacagggcactcgagcccggagcctgcgggagtgtgcagctgcggtcacagcgggcgtggggggcctgccgagccttcaagggcaggctactccacagcctcagccggaggccgcccctgagcccagcgaggggagaaaagccgtgtgtgtgtcccccgggctgccagaggggacctggacagaaccctctcctcccagcccaccttcagggaaatgctcgaggccgggtgcggtggctcacgcctgtcatcccagcactttgggaggccgaggcaggaggatcacctgaggtcaggagttcgagacctgcctgaccaacatggtgaaaccctgtctctactgaaaatacaagtatgagccaggcgtggcggcgggtgcctgtaattcccactactcgggaggctgagctctcatacctacgtgctcctcagtgacggggacggtggggagggcctggattttctctttatctgccggtggggggcctgtgttttcaaactgattgaggagctgaaagacaagaggcgagagtgccgggagctcctcgggggcccggcccggggctctgaaacgcgaggctgcaggacctgcaaaagcaccgaggccgcgtttgtcctgggccctgggccccttggagcccgcccggggtcggagatcactgtggagcccacgcggcccccccgctcctgggtcccctgacggtggaatgggggaatgggcggaggcccgcgctcctgggtccctgacagcggaatgggggggggggccgcgctcctgagtgccctgacggcggaatgggggggccgtgctccggctggtgggctactgtgagggtcgggtcctgccagtgacaaaatgctccaagggctcctcagcaaggctgagacgggtggcacttggaagcaggtcagggcgcgacctctcgggaagagggaccgcgtggcctcctgaccatgtgactgtgggcgagtcctccccgcggttttgctacaacgttccgcgtgaacacaggagaacccccaaagttgccaagactcagaaatggcaggaggaaggccggagctgccccctgtgcccgccagagcgtggaggctgtgcccgcatcccctttgacctttgtggggcttcgtgggtccaggcagtggggcagctcccaggggtgggcagcccagccctcccccagcaggcactctgggccgtggccacgctgtacctgtgtgatgatggcatccaggccgttggccccccaggcgtagtccatagggtttgagtgcaggactcccctggaggtggaaggtggggttcaagtggctgacgggcagctggggcaggtgcgtctatccaccccactcaccaggggcccaggctggggatggggacaggcaccccctcctactcaccagggaccctggctggggatggggacaggcacccccacccactcaccaggggcccaggctggggatgggaacaggcaccccctcctactcaccagggaccctggctggggatggggacaggcacccccacccactcaccaggggcccaggctggggatggggacaggcacccccacccactcaccaggggcccaggctggggatggggacaggcaccccctcctactcaccaggggcccaggctggggatggggacaggcaccccctcctactcaccagggaccctggctggggatggggacaggcacccccacccactcaccagggacccaggctggggatggggacaggcacccccacccactcaccaggggcccaggctggggatggtggcgggcgtgatgatgccgttgacgagctgctggatgatcctggaaaagagagcgccagtcacggggtgaggccgccccacgcacaggagaggcgccaggcctgccaggtccgtggtgagcaccaagggcagggccagcatcagcttctagattagcttctatttatttattttactatgagccagggtctcactctaatgccgaggcaggagagaagcagcttgatcttggttcactgcagccccaacctgctgggcttaagcgatcctcccgcctc[135 bp omitted]gcaacctctgcctcccgggttcaagtgattctcctgcctcagcctcctgagtagctgggattacaggcgcccaccgccatgcctggctaatttttgtattcttagtagagacggagtttcatcatattggtcaggctggtctcaaactcctgacctcagtgatctgcccgcctcggcctcccaaagtgctaggattacaggtgtgagccacctcacccagcctcagctactttttaaaaattagagatggggcctccctacattgctcaggctggtcttaaactcctgtcctcaagagatcctccctctttgacctcccagagaactgcaaatacagcactgagccaccgtgcctggcaaaattagccacttttaaagatgacatttccagcaggtgagacacacaaccataaaagcatcaaccgccaggagtagggccctgcgacggctcccccaggctctgttccaccaggagcagggcccagcgacggctcccccaggctctgttccaccaggaatggggccctgcgacggctcccccaggctccgttccaccaggagtggggccctgcgacggctcccccaggctccgttccaccaggagtggggccctgcgacggctcccccaggctctgttctgggcccaaggcctggacagcgtttgacgacacgcgtgtggacagcagtctccagagcacgtgggcctggcaggcacacggtgccccactctgtggtcaacccacacaccctgaaccggcatacttctgtctccgaagggccgtgtggggagtcacagggggctggagggcctggccgggcggcctctccagagagcctatggatgatgccacgtttccgtggaacccgtgctggattctaagcgccagaacttccgacctcaaggcgtggggccctcgcggccacccccggggccccctcacccttccagcgtggggacgccttcgtgccggccggtggcccgccgcgtggtgaggcgggcgcggggctgtcgggcgccgtaccggtgccgggacggatggtctctctcccgccggctctcagggtccctgccgtcgtcagcctgcgccccaggagggaacgtggggatctcgaagctgtcatcgaagatgccgaaagcaaactgtccgtagccctgcggcagcgtgaacaggtgctggtccacgtgctggggagaggaggggggcgtgacctcgggggctcaggcccgtgcagtctgctgggggcgctagggcacaaagacaaaggagaaagcaagacgggccctgctgggtgccgggtgggagggagacgcagacagggaggcaggaattgggcagagcctgccccgctggtgtgagatgcctcggtggaagtttcgctttcatccaagaaaccaaccaagcagcgtgggccgccccaatccctggcccgggcccctggagggaaaaatttcctccgccgtgcgggcagggagagccggggaggcgaggtggggacaggctggcgctcggggccccgagcaaggctgacacgatcgggaagcacgaggggcgggcgactcacctccaacggtggccggctctggtctgtgggagctgtggagggggcagaaccattttctgtgctcctggggagagagtgcaggtcagcagtgccggctaccctgtgcccccatgcgccaggcgctccctcccctcaaaagcctatgttgggagagcaggaattgtccttggcactgcttcccacccgccaccgccccagcatttggtgccgtaacccgctgctgcttccctcgccagtaaaccacgggtttctcgataaaccggtgcagaccccaacagcctcctaagcgtgagaatgtgggtagggcccccgtggccccttccccggagggcctgggtcaccagattagccgccgaggctgagggaggtgagcggctgcacaggttgccggcactcccctctggccccggcccggccatcacagaagagaacggcacgctgctgtctgcacagagaaaagtgctcccggagccacagacaccagggcctgacggccccacactcggcggggcggacgccagcacagcccacacccctacaacagctgaggcccggctggctcttccagcctcttcaacagggggctgcattacctggtctcttccggaagctcctcgataaaaccagactcgcatcttggacagatataatcctgcaggagagaacaggaggccgggtcacggtgacgccggcatcacctgcaaacccccccaagtgtgaggacagaggggctccggacccagcggtctctggctggccaggcacacgcaggccagggtggctcccaacccgtgggtcctggagggcggccgaggggacctggcctctgccagccacccgctgaccctttggtggctcccggcgatctgagcccctccgacctggccccaccgtgacgggcgtcaccagcgtcatcagcgccttggctgagcccctccgacctgccccaccgtgacgggcgtcaccagtgcctgggcacctcctcacacaggtggcaccactcggaggggtgccccaataccccacagtggcatttccaggacgctctggcagccccgcacacagcccgttcccctggctcgggggaggccacgtccacgctggccacacccctgcaagaccccatccccaggtccccctagagccaaggacaacacaaggccaacatggtgatgtcccagaggagacgtgaggaccctgcccagggacagccgtgggtgagtcccaaaaccacgttcacagttccccagcaccagcctcaagccacagctgtgccgagcaggacggatgccatcccctgtggatctcacactgcaacgggatccccagggctgaagggcctgctggagacactggctcacagggcggactcctcatggatggctgggcccctggtgatggcggagcgtgccgagcattcgtggggcctgggctgaaacgtgcatggtgcctcccggcctcaccaggggctgggcagatgccgacacacacttcccgcacagcctgcagaactggaaactggaagctaaatcaactgctctctatgaacgacccagtctcaagtgctccatcgcagcaacgtgaaaatggcctcacacggcacgtgtcatcacgccaggggctcacatgggggtcccaagaccacccccaggtaacacagacaaaaacaggagacaaggctcccaccgtgcatgggggagtgctgtgaggggagccaaggtcgaccccaggctctggggatgcaggttgcaccggggctgttcagtcttcgcaggggcaggggctgggacctctccagcaagcaagatcccggcctcacccactgactctggggagaagcgggggtctggcgtgcagtgcccaaggggagggccgacagctgggcccccgcccacaccacgccgtgcctgcctcacctgctcctgccactgaagcacaggctgggtggggagggactaaggccagggtgagcaaacgatgccagatgcacatgaacccaccgtgaggggagagtgaagaggcaccatctacaatatagaaaaagtgcggcccggctcctggtgaggccgggaggcaccacatgcgtttcagcccacgccccacgaattctcggcacgctccgccatcaccgggggcgcggtggctcaggcctgtaatcctggcacttcgggaggccgaggcgggcggatcatctgagatcaggagttggagaccagcctggccaacatggtgaaactctgtctctactaaaaatacaaaaattagccgggtgtggtggcgggcgcctgtaatcccagctacttgggaggctgaggcaggagaattgcttgagcccgggaggcggaggttgcagtgagctgagattgtgccattgcactgcagcctgggcgagggagcaagactccgtctcaaaaaaaaaaaaaaaaaaaaaaaaaaaaaaaaaaaaagtgctggccgggcgcggtgtctcatacctgtaatcctggcactttgggaggccgaggcaggcgaatcacctgaggccaggagttcgagaccagcctggacaacatggagaaaccccgtctctactaaaaatacaaatgttagccaggcgtggtggcacgtacctgtaatcccagctactcaggaggctgagacaggagaatcgcttgaacctaggaggcggaggctgcaacgagccgagatcatgacattgtaactccagcctgggcgacagagtgagactccgtatcgggaaaaaaaaaagtgcttacaactcaaaagaaagaaagaaagaaagaaaaaaaagcccaggccaggtgcagcagctcacacctgtgatcccagtactttgggaagccaaggtgggcagaccatttgaggtcaggagcttgagaccagcctagccaacatggccaaaccccatttctacaaaaaacaaattagctgggtatgctggggtgggtctgtagctccagctactaaggagggggaggagacaggcaggagcgggaggcaggaggcagaatggcttgagtccaggagatcgagaccgcagtgagctgtggtcccaccactgcgctagcctgggtgacagaaccagaccctgccaaaaaaaaaaagaaaaagagaaacagacaacgcaactaaaaacgggcaaagtcgggaggctgaggcaggagaacggcttgaacctgggaggcagagcttgcagtgagccgagatcgcgccactgcactctagcccgggcgacagagtgacactccatctcaaaaaaaaagaaaagtggggggggaaaggacgtgtacaggacatgcctccaaaaacacgctgggtaaacgcagccggccagccccagcgagatgccacttcccagggccagccaggacgagatgcaagaccccgtcaggcctgctgggagcccagaagtcccccagatggaactaccccatgacccacgagctagaactttcactccaggcgcagaccccagagaaacgaagacacctgcccaccaaatgttcacatggccagaactggcaggtgagagttcacggcagcacagttcatcatcgtcgtcggcagatgcaaacagctccagtgtccacccgcacctcagagcacgactcaaccatggaaaggggcaaggcccagaccaggccacggcgggggggaggggggattgcatcttgaggacatcacgtccagtgagagatgccagacacagaagaccacgcagcgtgtgatcccacgtctatgaaatgtccaggacaggccgagccacagagacagagaggggatgtgtgagcaccagggcctgggggaggggacggggagtgacggctggcagggctgaggtgggttctttttgcagctgtgagaatgctgtggaattagactgtggtggtggttgcacaactttatgaatatactacaaacgtttcaccaggtgaattatatggtgtgtgaaaatactgagataaagctattaaaataaatgggccaggcgcctgtggtcccagctgctagggaggctgaggtgccaggatcgcttgaacctgggaggtggaggctgcagtgagccaagattgcagcaacagagtgaggcagcatctcaaaaacaaaaacaaaaaaaagaaagaaacaaagaaaaaaagggctgggcacagtggctcacacctgtaatcctagcactttgggaggccaaagtgggcagatcacttgaggttaggagttcgagaccagccaacatagggaaataccgtctctactaaaaatacaaaaattagctgggcacggtggtgggtgcctgtaatcccagctactcaggagctgaggcacgagaatcgcttaaacccggcaggcagaggttgcagtgagccgagatcataccactgcactccagcctgggccacagagtgagaccgtgtcagaaaaagaaaaagaaaaagggaaaggggaaggggaagcagccaacgaccaccactgtggccctgagcttagtgtgggagcagtgtggctctgccacagtggccgtgacaactctccccaggcgtcggttcttggggtgtgtttggggtgtcgggattgggacgccccacgtaaacacgctgagacttcacagtcaaatctgaacccctggtttctgccggtgtcgggtctatcggggctcctctgggctcaggggttgccgccgtccgcccgccagctgaccgggagcccagggccgctccatcgcctgggtgggtctctgggaatggaggggtagctcagggctcaggctctccctgcatggtgactccccaggctagcaccacccagtggacctggaacagctgcactggcccccactgagggcaggacgtaagtcagctgtgcagctgccccgaccaccatctctcctgctgggtgcatccacaaggtcaggcagccccagaagggcctgagggagaagctgtctccctctgaggaccctggcttgccagccccagccccgaatctctcctggacaagcacgaggccctgcacacgcccacgtggcctggcacagcgctcggccgctctggtccccatgtgccgagctcagcccctctgtgcatcactggctttctgtcgggctcccgggttcccgtctcagtccagggcacaacgcatgctcccgccacccgcactgccggctcacgacagcccgacctggccacatacacactcatctgccccagccctggcctcctcttggcccccgctgtcctgcccgcagcggccgtggggcctggtgccacagcactgtccagaaccctctctctgcagcacccactccagcgtcggggcctgtgcacgtcggccctgctgctggaacgcccaccctaggggtttcaaaggtcacctctctgctccaagcctctgccctgtcacagaggacagcctggacactcactcatatctgaaatccgggtgccatcgaggacgccaagggctgcgacccaactcctgcgtattgtcagggctctgggctgtctctcaggcccccggccagcccctccagggccaccgaaggccggaaccgaggctctggtcacgaaggcaagtgacaggtggatcccggatatccagggtggaggttgagcctctgctggccgacggtgggaggggctggacctgggggtctccagccgccctcctcctccaagggcacagccaagagaccgcttggtctcgtattaaatcggggcagctgcaggtagaaacgcctgggcaagggggcctggtgaaggagctgccccaccttctccgggggcagcacgcactgggggcccccacagaggccccattggagcctctggccctagcagaagacggtgaatccattcacctctccgtcagagaacagatgcaggaggtacgatcacccggcatcatcaccatagcaacagctggccaggcagccagggtaggggggaccctgccagtgccgggctccacccatgcacccctgcagcgtgatggcctcatccccgggtgggacctggcagggcagcagaggccccttcatccacggggcctgcacggggcgcatgtcctgagggcccagggccaggcgcatggaggggagtgggctggcgacctacaggccccagatgactgacagtgaccagggcaggcaggcccctggtgacagtgactcggcccctgtgggtggcagggccctcgggaagctgtgcacatcaggagaccccagggagagtcatggtgcagtgctcggcctcggtaggagcccccgtgctggctactgttttcctaaagggtgcccaaagcttcccggctgatccacagtgtgtgggccccgcagccccagaggcacgggcacgtgcggcgcctgcacccctttcttcccgccctcagcagctgccaccacatcccacattcacaccgtctgtccctgggccccacgcaccacacactcccaagacaagctggatggacgaggcgtgagcgaagccactgcctcagcccaggctggggccccgcctcacaccccagggcgtgcctcggcccaggccccgaactctgccttcttcttcccaggtggcttcaggcaccaccactagggactggaaccccacaggtgcccatccgtgccagtgccaggggtgctacggctcgcccgaggctcagaggaaggtcctcatggtggcagagttctaagtgggaggaaattcagcaccggcatctgcccgaggcagaccccagcgccagccggccagagagggcagccgacatccacaggttcccggggtattgctggtgcccgatcacaacgccaggctccatgttcacagggtgctgcagggagcccgttccggagaacccagctgtgcagagccgctccagggtgctggccggacgcttgagaggcaggggcaggctgtcactgtcacggtatctggcacaaccgcagacacacagagcaagcagcggccagagacagacccaggccgtcttctgaagactcgggccaggccgccgcagggaccaggagaagacagggtgggccggggggcagctggggagacttcccgcctggccccatcagtgacactggccgtagcagccctcacttcctggtggctccccgcccacgccggctcttccccgccaccgtgggcggcagggcccagcacccccaccgtcctctcaccgccacttggggacactgcggaggttgcaggcgttcgggggtggggggtcggcaggcagagctggaaccaccctaggaaccacccagagacggggaggtcaggggcaaggacggcacgcagggccacctccctgcgcccgcctggttcctgggggctcagtgccctcagcagctctcgcccacaccctacagtcacagctccagtcagtgcctcctcagcaggctcgagtctgggtctgcgcagccgcctgtggcctgagctccagctggcctgtctggttcctgccgccacacgccccactctggctgacgctccctttgctgctcagacacccagacaccctcgtcatcgccttttttttttttttttggaaggagtcttgctctgtcacccaggctggactgcagtggcacaatctcggctcactgcaacctccgccttccaggttcaagcaattctcccgcctcagcctcctaagtcactgggactacaggtgcctgccaccacgcctggccaatcttttgtatttttagtagggatggggttttaccatgttagccaggctggtctcgaactcctgacctcaggtgatccgtccacctcagcctcccaaagcgatgggaccacaggcgtgagccaccgcgctcggcctcatcacagcctttcatgggggcaactgctgcccctgtgccgtcgtcgcctgagcccccgaccgcaagtgtggctccccgctcaggacaccctcacgagtcaccaggagagcggccaggtgccggccactctgcacacacgtgcccaccagatgccacggggagcgaatcgcatcactaaacccacttggcaggtgaggagactgaggccaaggctgcccagcagagaatgacccagctgcgcggggcctcagcctgatcccagagcccaggacagcaaaggaggcccggaacggcccagctgcctgggagaagccctcgtgggcaggcacacagcccatggcagccagtcccccctgcgtcagaggcaggcaggagcttcccgacagccagcccaggtgtctcagcagcagcagtgccgcccctgactcagccgccgggcaagctccccagcggcagagacgccccgtttcgagggcactggttgtggctggggactttccccattgccagatacggagcagccgtccctccccagaacaaacgccaggtgtgcccatttcccagcataaaaaattcgtttttgagacagcgtcttgcttgtcacccaggctggagtgcactggcaccatcacggctcaccgcagcctccacctcccaggctcaagcgctcctcccaccacctcagcccccgccagtagctgggactccaggagtgcaacaacacaccccactaattgttttagtcttctgtagagacagggtcctgccacgtacggagaagttctgacactgccatgctgtctacgggcgccttgttgcgtcctgctccaaaggcacaagcagatgcccttgggatcacccgcggggtggacacgggcaggcccccgcagccctctctgcagttatttgctcttaaggaatctaccaacgtccatgattaaatatttgtcaatcactgttccatgctggctccctggccagcctgtaaattctgtgagggcaaagaccacagcggcctgtcaccacagagttcctttcactacaggaaggccctccccaggcccagtgacagtcggaggaggtcaaggtcctccgtgtccaaggccacggggcgaggaagtggctccaccacaccaggatccagtcctgtgcgggctctaggagcagctaaatgtgcagccgagtcaaggcagtgtcggccccccacagccaccactccaggcttcccaggggcttcccaggcctgtcccagggctcaaggggctgcaaggggctgccctgcaactcacccaggctggcgggctgtcaggcaaccagcctctcctgccacggccagtggggacagaaagctggaagaggcaagagcgagacccctgggagacagaggagtaaggcaaggctcagtctcagctccccaaccttcgccccacacccgagatttcactttatttgttcctcctgctggggaggggaagccctgtggcttcagtagagaggaaaccacacctctctctttccactcctgggcctggccccgctctcccgccatgccccaactctagcactcgctcctcctctgtgacccagagacaggcggcttctcctgactccctccagccccttcctgggtctctactcccggggaactgcactgcttctggggggcttggacttctcttacgggtcaaagcgtagcaacagccgggcggctacgtacacagcacagtaaatcctcaatgcctgcagcctcttcccctgggcacagggtggggagtccagacccctccacctcctgcggctgctcccctcaagctggccaagcggctcccgactgagccggctctgccactttcccgctgagccaccacgcgcctcagtttccccatctataaagcacgggtggctcgactaaatcaccactttgcacgtcagcctggcgaagggcaacacgggttaaaaatgcagaccaccgccgggcacggtggctcacacctgtaatcccagcgttttgggaggctgagccagaagaatcgcttgagcccaggagttcaagaccagcctgggcaacacagggagaccccattcctaaaaataatattagaaatgcagactgctgagcgcattccacacctactgactccgaaaccctggaaaaggggcctggaaatagcaccttcaacgagcgctgctcccacctcccccaaggtgacatcaggtccgcgtgggaaacactgccctaaacgagcaggaagtagcactcggcacgcccaggcccagggtcctcttcggtgaggggcggctgtaaacacctggaggaagggtgggctgcgcagccaagccccgggaggggaggaacgcaggctctgctcacaaagccccgccggcgggccgcggtcggaccccgggacagtgcctggggcgttccgggcctgggcctgcctccaaggcggcggccagggctccacgaggcgagcctgcagcgaggcgccggcgcccccaaccacgcgctcggcgggggtcccctggcgttattctcggggtccgagccccgccaggcccagcccctgccccgcgccgcgccaccgggcaataccctctctctgctcgccgggcctcagtttctccgtttgcaaaaccaggctcaccgggcttagggatcccacctgggatcctcgcggcctctcgggtcgggaacgccgcggatgtggggtcacccggccgcgatcccgctgcgccgctccggccaggccctgcctcccgcccgggcctcagtctcccgcatgtacaggacggggttcgcgcgcgcaccgcccgggctccccgcggattcagcctgggccggcgctgccccgagcctcagttttcccgtcgtggtcagctcgcgcaagaggcgggcgcaagcgacccccaccccggccccggccttgcctcaggcctgcggcgcagaccctgccgcccgccgccccggcccgggcctcaccggcaggcgcgggacgatctccacggagcagcagtggcagaagtaccgtccgggatgcggcgacgcctcggccatggccgccgccacctactccgcgccgcccgccccccgcgcggcacccgccgccggccgtttgctgctccctcgccggccgacgcgcccgcgcacgctcacgcacggcacgcacggcacgcggggcggagcgggggcgcgggagcggcgaaagctgcgtactcggcgggcagcggcccgggcgacggtggccgctgagagacaaactaggcccggccgttgggcggggctccaagcgggggcggggcttccggcgggggcggggccaaagcaggcggcggaagagacgagaagcggggcgtgcgcggggcggggccgaggccctcctcccctcccgaagctgcccaggccttcgtgtccctcagtgcttccctacctcatcgccgtctcccctcacggtacttcagcccactgtccccaccgttcctggggctcgccaggcgccctctcccccgcccgctgcccggtgcagcgctctcccgacgcccgcgtggctttcttccaggtctttgctcaaatgtcagcttacaaggtcttctctgctgccctcctgctccgtggcactgattccctcccgatgcactgtcaggtcagctgcgcagcaaagggatttttggacccgcagcagcgcctgacacacagcaggcattccctcagcgctgcggaatacaggcagacccggggctcagggcgctgtctgggcctcactgggacccgtggggtcagacagaggctgaggtctgtgggttgtggccttgtttccaagatgctccacgggctgacggcccaggcgcctctcgggtgcggagaaggcaggaaacctaacccctgcttccaaatttaatcagtagaaacggtatcatcacccagcacaggccaggatcatttctgaggttagttctggcccaatcatgcatgcatttcttttttctttttttttttgagacggagtctcactctgtcacccaggctggggtgcaatggcccgatctcggctcactgcaacctccgcctgccgagggttcaagcgattctcccgcctcagcctctcgagtagctaggactagaggcacccgccaccacaccggctaatttttgtatttttagtagaaacgggg[136 bp omitted]ctcattgagcaactactgcacaccagaccctatgctgaatgcacgcagatacccccagtcccatgagattggacaggagcgtggaactcaagggtgactctggctctgcctggggaaagagagagagggcttccgaggggtaaggacattggaaccagggctgagggatgaataggatttggttggagttggacttcctgcaaaatgaggcattggagcgagactgttgaggaattaagagttggagcctgtgcatttagattttttgtttgtttgtttgttttttagagatggagtctggctctgttgcccaggctgcagtgcaatggcgcaatctcggttcactgtaacctccgcctcccgggttcaagtgattctcctgcctcaggctcccgagttgctgggattacaggctgggcaccaccacgcccgcctaatttttgtatttttagtagacggggtttcactatgttggccaggctggtctcaaactcctgacctcaggtgatccgcccgcctcggcctgccatagtgctgggattacaggcgtaagccaccgcgcccggcctgcatttagggttttgaatgtccagaggttggggacaggggcttcagcctccttccagtcgtctttgcagcagcgcgaatccagtcattcctgctctgaccaccagagagcgcacgggccccgtccctgggaatccaggaaaaccccaggctggggaggggcgaggcttgccagacgcagcccctgcaccagccttcacgctccgcaagtgcaggaggagcagcaggcctggttcaaacgacgccaaaccacgaactggctgtgtgtccctaggcaagtggcctaacctctgagaaggcggcagaacctgacggttttccgttggctcggagcagacatgaggaccgctggcacctcctcagccctctctgtgctctgctgcctgccccgagtcacctgcccctcgctgacccctccccagcctcactggcccccttgggtgggctaagcaggttcccacctctgggccttgcaaggctgtgcccttccccaagtcccctctccttcccctgcttttttttttttttttttttttttttgagatggagtctcactctgttgcccaggctggagtgcaatggtgcgatctcagctcactgcaacctccgcctccaggggtcaagcgattctcctgcctcagcctcccgagtagctgggatcacaggcatgcgccaccacgcccggctaatttttgtatttttagtagagctggggtttcgccatgttggccaggctggtctcgaactcctgacctcaggtgatccgcccacctcggcgtcccaaagtgctgggatgacaggcgtgagccaccgcgcccggccctttcccctggtttttaggaggctgccccatccaccactgcaccccacttctcagagccccctttccatcccccacagccatcctcacatctgtgggttattaatggcgtctccccatatgtgaggccaatacccagcgcaccagtaggtgttcagtagattcccaaatgcaccaacagttgccgagtgtctactgtgtgctgggctcaagcaggtgctggaaacacagtgggaatgagaaggaacgtagggattttgtatcaaactaagcagggcgaggtggctcacgcctgagaccaggagttcaaaaccatcctgagcaacatagtgagaccctgtctctacaaaaatagaattaggccggggacagtggctcatgcctgtaatcccagcaccttgagaggctgaggcaggaggatcacttgagtccaggagttgaagaccagcctgggctacatggtgaaaccgtgtctctactaaaaatacaaaaattagccaggtgtggtggcgggcacctgtgatcccacctactcaggaggctgagacagaaggatcacttgagcaggaggcagaggttgcagtgagctgagatcggaccactgcactccagcctgggccacagatggagaccccatcttttttgttttgttttgttttgttttgttttgtttgagatgggtctccctctgccgcccaggctggagtgcagtggcatgatctgggctcactgcaaattctgcctcctaggatcaagcgattatcctggctcagcctcccaagtagctgggattacaggcatgtgccaccacgcccggctaatttttgtccttctagtagagacggagtttctccatgttaagtaggctggtctccaactcctgacctcaggtgatccgcccacctcagcctcccaaagtgctgggatcacaggcgtgaggctaatcgttttaaatttttattttgtagagataggatctggctatgttgcccagagtgatctccaactcctgggctcacgggatcctcccaccttggcctcccaaagtgtggggatcacaggtgtgagccagagtgcccggccacccctttatcccaaacacaccaaaaagcaggctgctcttccctgaaggcagtagcacattgatcaaatcggccagtgggcactgacactgctgcacacaaatgcacacacttgcaccctgccccaggccccaccggccaccctggttccacagacggcaccgtttctcccatttcctctcaccagggacctcgacaggtgtgggcttggttccgtgagctctcttagcccctttttcaattcaggatcccgtccccgtgaaccctgggggcctcggcaaacatgagacgagaggactcctaaaggaatgacacgcgccactccctccggggcagagaggtgtgttgacagctcattctcacgtcccaggcagaccaagcccaggtggaccacgtcccaggcagaccaagcccaggtggaccacgtcccaggcagaccaagcccaggcggaccacgtcccaggcggaccacgtcccaggcggaccacgtcccaggcggaccaagcccaggcggaccacgtcccaggcggaccacgtcccaggcggaccaagcccaggtggaccacgtcccaggcggaccacgtcccaggcggaccaagcccaggtggaccacgtcccaggcggaccatgtcccaggcagaccacgtcccaggcagaccaagcccaggcggaccacgtcccaggcagaccacgtcccaggcggaccaagcccaggtggaccacgtcccaggcagaccaagcccaggcagaccacgtcccaggtagacctagtggttgtgtattcacttctcccaacccccctgggaagaaataactgcagctggccccattgcaccaatgaggaaactgaggcccagggaggaagccgattgcctgaggcggcagctttgggactggactgtggctgcctcctgaggaaggaaacagttcctccctccaccctcatcctggcaggggttgggccaccgttgcttcatcaagtgtcgtggagcctccgctctgtgccaggagcggggcctgtgccacaaacgtctgctgaaaccagccatccacccaacagtatcgagcaccatgatcggaagagtaaaggccccaaactgggccaggggcggtggctcattcccgtaatcccagcactttggaaggctgaggcgggtggatcatttgaggtcaggagttcgaggctagtctggccaaaatggtgaaacccatctctactaacaaaaaaaaaaaaaaaaaaaaaaaaatggccgggtgcagtggctcatgcctgtaatcccagcactttggaaggccgaggtgggtggatcatctgaagttgggacttcgagaccagcctgaccaacatggagaaaccctgtctctactaaaaatacaaagttaaccaggcatggtagcaggcatctgtaatcccagctactcgggaggctgaggcaggggaatcgcttgaatctgggaggcagaagttgcagtgagccaagatcttgccatttcactcctgcctaggcaacaagagcaaaactccatcttgttaaaaaaaaaaaactagccgggcatggtggtgcctgcctgtaatcccaggtactcgggaggctgaggcatgaaaatcacttgaacccgggagcagaggttgcagtaagctgagattgcaccactccactccagcctgagagacagagtgagtgagagacttcacctcaaaataaataaataaagtccccaaacacacttgattttagcccagcaagactcatgtctgttgcgggaagtcagggaccccgaacggagggaccgcctggagctgtggcagaggaacataaattgtgaagatttcattttaatatggacatttatcagttcccaaattaatacttttataatttcttacgcctgtcttactctcatctcttaatcctgttatcttcgtaagctgaggatgtatgtcacctcaggaccaccgtgataattgtgttaactgtacaaattgattgtaaaacgtgtgtttgaacaatatgaaatcagtgcaccttgagaaaaaacagaataacagcgattttagggaacaagggaagacaaccataaggtctgactgcctgcagggtcaggcaaaaaaagccatatttttcttcttgcagagagcctataaaaggacatgcaagtagggaggatatcgctaaattcttttcctagcaagcaatattaatattaataccctgggaaaggaatgcattcctggggagaggtctataaacagctgctctgggaatgtctgtcttacgtggttgagataaggactgagatacgccctgatctcctgcagtaccctcaggcttactacggtggggaaaaactccaccctggtgaatttgtggtcagacgtttccctattttttgttcaagatgtttatcaagataatacgtgcaccgctgaacatggacccttatcagtagttctgtgttgccttttctcctgttccctcagaagcaagtgatctttgttctgttttttgccctttgaagcatgagctctactccatgttctcacaccccctcccctcttgaaacccttaataaaaaacttgctggtttaaggctcagggggcagcacgatcctaccgacatgcgacgtcaccccccggcggcccagctgtaaaattcctctctttgtactcttcctctttatttctcagccagccgacacttatggaaaatagaaagaatttatattgaaatatggggggaatgggtccccccgatacatgtcagatttcttttatttatttatttatttatttatttatttatttattgagatggagtctcactctgtcgcccaggctggagtgcagtggtgccatctcggctcactgcaagctccgcctcccgggttcacgccattctcctgcctcagcctcccgagtagctgggactacaggcgcccgccaccatgcccggctaattt[131 bp omitted]atttatttattttttttgagacgggggtctcgctctgttgtccaggctggagtgcagtggtgcgaactcggctcaccaaaacctctgccctccaggttcgagcaattctcctgcctgagcctcctgagtggctgggactacaggcacccggcaccacacccagctaatttttgtatttttaatagagatggggtttcaccatgttggccagactggtctcaaactcctgaccttaagtgatctgcctacctcagcctcccaaagtgcaggaattacaggcgtgagccactgcgcccagctgttttgttttttgagatgaagtctcactgtcacccaggctggagtgcagtggcgcgatcttggctcactgcagcctccgcttcctgggttcaagtgattctcctgcttc[137 bp omitted]cagcctcccaaagtgctgggattacagatgtgagccgtggcacttggccagtggggttgctttagggcccagctcacaccgcacccggctgatggggttgttttagggcccagctcacttcccagtgttcccacaccgcccaccaggccaggccttcaggcctgagccatgttatcagcatcacaggctccggagtccagcaagtctttgcctcctggagcccaggggttggcaagttctagctcagaggctgcagacaatagacagtaagccaatgccaagtatctttgggctcaggaaggtgggaccgggtgtccctgactgttctgtaccaagccacaacccgcttcccatcctggaggccgaaggtggtaccgcagggtgagctccctagagccccacagaacacgctgctctgggtcctaaaggctctccttgcatgaatgcaaacctgctgactacaaagatggttattattatcagctccaaggtacagaaactcggtttaaactggcttcatctccctgcggaggaggagttcaggcacagctggatccagggacctccaatgtcactgggaattgttgctgtcccctttggctctgtggcccacggggctggcctctccctagccatcagaaagagccacctgcaatttcaggctcacacctctccagccccagcaggaagcaggtgtccctgtccctctcccagcaaaattccagggccgttggccaggcgtggtggctcacacctgtaatccccgcactttgggaggccgaggccggcggatcatgaggtcaggagttcgagaccagcctggccaatatggtgaaaccctgtctctactaaaaatacaaaaattagccaggcgtggtggtgggcgcctatagtcccagctgctcgggaggctgaggcaggagaatcgcttgaacctgggaggcagaggttgcagtgagctgagatcacgccactgcactccagcctgggcaacagagcaagactccatcttaaaaaaaaaaaaaaattccaggactgactcgtcctggtggttttgtgttttttttgagacagagtctcactctgtcacccgggctggagtgcagtagtgggagcagaaagggggaaccagccccaggctggccctcgtcgtgtggtccatgggaggcacaggggtcctggaagcttctgaacctggtgctgaccctagtcctgactctgcaggtctgtgtgactccaagaaaatcacttcccaccctccaacctcatccctataaatggggcgcctgcctcacagcctcccagcaagcagcaaaggggactcaccatggtcccgttctgcacgagcacccattgactgggtaattaacaggaatctatgcacgccatggccctactgtgcgcctggcactgtccacatcccacctggaacctctaacactggggtctgtgcccatgttacagataagaaaacaggcataggctgggcacggtggttcacgcctgtaatcccagcaatttgggaggccaaggcagctggatcgccagaggtcaggagttcgagaccagcctggccaacatggtgaaacccatctctactaaaaatacaaaaaattagctgggtctgctggtgcatgcctgtaattccagctactcaggaggctgaggcaagagaattgcttaaacccgggaggcagaggttgcagtgagccgagattgcgccactgcactccagccttggcaacaagagcgaaactctgtctcaaaaaaaaaaaaaaagaaagaaaaagaaaacaggcctagaagggtcccagggcctggcacacagtgggcacccacggctgctataacaaatttgcacaaactgcctggcttaaagcaacacacgggctgggcgcagtgtctcatgcctgtaatcccagcactttgtgaggccaagatgggcagatcacctgaggtcaggagtttgagaccagcctgaccaacatggcaaaatcccgtcactgcaaaaaaaaaaaaaaaaagtagccgggtgtggtgggaggcgcctgtaatcccacttagtctggaggctgaggttgcagtgagccgagatcgcacctctgcactccagcctggacaacagagtgaggccctgtctcaaaaaaataaaaatggccaggcatggtggctcacacctgtaaccccagcactttgggaggccaaggcgggtgaatcactgaggtcaggagttcaagaccagcctggccaacatggcgaaaccgcgtctctactaagaatacaaaaattagccagttgtggtggcaggtgcctacaatcccagctactcgtgaggctgacgcagaaggattgcttgaacccgggggcggaggttgcagtgagccgagatcgcgccattgcactccagcctaagcaacagaacgagactacgtctcaaaaaaaaaaaaaaaaaagttccacacgggtctggctgggagaagatcgaggtgttggcagagctgcattccttctggcagctccaggagagaatctgttccgcgcctttccaggctcctagaggccgcccacattccctggcttgagcccccttcctccatctccaaatcccgcaatggca[141 bp omitted]tcccaggttcaagtgattctcctgcctc[216 bp omitted]tttaccatgttggccaggctagtctcgaactcctgacctcaagtgatctgcctgcctcggcctcctaatgtgttggaggttcacaggtgtgaacctaatgtgttggtggttcacaggtgtgaaccaccgcgcccggccaggcatctcctcttctacggacccttccaggacagtgggccatccgtataacccaggatgaacccctgtgtgaaagccctcaactcagtcccatctgcagagcccctttggccagggagggtgggacacccacgggttctagggatgagggccccatggtctctgggaccgccgttctgctgaccaccccccactgctctccccctcactcacagcacaagcgtctgtttccagcgcacacccctgccgctccgtctgacgttcgagtctcaacctcaacgtctctttcctctgggaagccttcctcagtctcccccaggcccgggtcaggcctggggcacctttgccatctgggcatcctccgccacagaacaacactggattgtcactgtctgtttacctgtcaggatgtacctggagggagacagaagcctggggggtgagcagaggccacgaggagccacggtgggtgtctgagccagggagaagtgttatggcagctggggtaggaagtgggccgcaggggccaggctgcgggctggaagtcctaggatgagcctcgggcctggatagggtggggagaggggcagagccgggagaggggaggtcatcactggggtctcaggaggaggcggcgctctggaaagggtcagtgacctgttagaggtcaccctgcacagagcctctgggttagggaagacagagccgggagcaggaggccactggcagctggcctcggtttccccggagagggccggaacccacgccagccagacaatgaccctttgattcgcacagcccaggccggagtggccaagccacggcggggtcaggtcttggccaaggtcacactgtccagcccccgcacatcctcagtgagaacacagggtcccatccctgccccactccccaatcccgggagagtcccgggggaatgccagaggccaaggccaggtcgagacggcggggtgtcccccgtcagtgagaacacagggtcctgtgcctgccccactccccaagccggggagattcccgggggaaatgccagaggccaaggccaggtcgagacggcggggtgtcccccctcagtgagaacacagggtcccgtccctgccctgctccccaagccggggagattcccgggggaaatgccagaggccaaggccaggtcgagacggcggggtgtcccccctcagtgagaatacagggtcccgtccctgccctgctccccaagccggggagattcccgggggaaatgccagaggccaaggccaggtcaagacggcggggtgtcccccctcagtgccactaaggcagaacttggcccctggccactggctgctgggggacacaggctgggcagctaaggtggaggaaagggtacaggtgtgtcttctgtgggcacagatctcactcaggccagagaaggggctgtgccgtggggctgctggacacgtccgtttccacctgcggggtgggcaatgccggcacagcgagtggccagacacaggcatgcccagcagacacccaaccgctctccaccacctcaaccttctgtattttcctgaaagcatttaccactccttgaagttatagattaatttgtctctgcattttgttgtccaaaccaggagctcggtgagggtgtgatggggtctgccttggtcaccgtggcaccccagcaccccgcagggtccctctggccaaaagagatgttcactgatgccctagaagcaggaacagaggggctcccctgcgctcgccaagggcgcctgacaaatctggaggcccccatgacagaatcagctccagagtaggaaatgtgtctggctgcacgaaagccccctcgggcgcagcgcctccaggcccacgcagatgtcgctgtcatacattgttggaaacgcctctgctggaaacagtgtttgctgaatcttggagggagaggaaaaaacctagtaaacattcttgttgaggtgatctgggggaatgtctgcaaaggcttggagggctgatggggcagagctgcccaggggcccaggacaaaggccaggcgtgcgcgcgcacacacacacacacacacacacacacacgcagtggcctccctgggggccgtggctgggcgaggcctgctgttgtccgagatgctggaaggagctgtgtctctgggtctgtcccggccgcaccccgttctgtcccacacccaaccactccccacccacaggccggctccagcggccaggtggacgggtgcgcggcccgcgctgtgagcagggaaccatatccagctgaggttttgggtgtgtggggcgggtcgggaacaaggaggccgggttggggggctcagaccacacttggaccatgaaagtgaccacatgcaaatcacagaaacgggatgcagggatccacagacgtgctcctcttgggtccccgttacctcaccgccacccctgaaactgaagacccccaaacccactttaattcctggagacggcccctcgatccacccaaaaggctgccaccacctcgaacccacacccctgtcccggttccgccctgggtccagccacatctccccaaatgcattctctggctccggaaggggacccgggcgctcgcccccaactgccccccgcagcggccgggcccggcgcctgcccaccccgcgcgggacacggcctcgcccccgccactcccgcgccgcgccccgccccgcgccccgccccgcccgcggcccgcgggacctttatagggagcgccggccgcgcgctgggaagtcggtgccgctgccgtctctgcgttcgccatgcgtcccggggcgccagggccactctggcctctgccctggggggccctggcttgggccgtgggcttcgtgagctccatgggctcggggaaccccgcgcccggtgagtggggcggccagaggggcgggcggggcgggccacccacgtggggctgcgcggaatgcggccggggggacgtcggggggcgcggcggcggcggcgggggcgagggcggtgtccggcgcaagctggagccgggaaggtctgaaggagggtcaccaagaggtcagcagagcagaggtttctaatcacaatgaccgctgacatttattgagcgcttagtgtctacctctcccctccctgaacctgtgccatcccgatagtgccggagctctcttcatctccgtcttccagatggggaaactgaggctcagggtcacacagcctgtagcaggcaaagccagggttctagccgcgaccgtccgggtcggtcctggtgccgagaggtagtgctgggtgtcgggagccaggccctccagctggggctgagagctttcccgggtcctgggtagacggggcatggagtctcacacctgggacttgccgggaggtgccaggcaggagacggccccactcctggcctcagtttcccctcctatgatgggtgccaaggtgctgcgttccacaagctggtccctggcagtgtctgtgaaccagcaagcgctctgggatgggggctgtggccgttcctgcccccagggacgggggaagaaatggggggctctctggctccccaccccccatccctgcagccccaccccaccccagccctgcgccaaagggagagcagagccccctccccgaaggccacgtccctggggagacagtgagctcatgcaaggggaatgttcccaagttggagtgagtaagaggcgggccaggcggtgggggggctgccaggcgcggggctccgcgtgccctcgccctcgggtgctgtctagacagagggcagaggcgggagaagcggctccagggcctgctgaccctgacatgcccagtgcctggtgtttggtggtgtttgaggggttgggcagggtgccagcccctggcctgggggcttggagggtacgggaagggacctcctggggtgggtgggggttggtggtgaggctgtgggggggggcacgtggagctcagaggggaggagacatttccagggttctggagccagggtggggacacccatgtggttttctgccccttcttcctgggtgggggtagatcattccgtgcgtaactactcagcaccacctgcatgcatctgtgggcgggccagaagctgggtgtcaggagtggcccaggagagcaccccgttccccggcccgcaggtggtgtttgctggctccagcagggccaggaggccacctgcagcctggtgctccagactgatgtcacccgggccgagtgctgtgcctccggcaacattgacaccgcctggtccaacctcacccacccggggaacaagatcaacctcctcggcttcttgggccttgtccactgccttccctgcaaaggtgagacctcaggccagaagcagggcagacgtctcagctcaggaccagccacaaacagtcatggtggtcgagggccgaacgtccagggactgagcccgtcacaggggtatgtaggaggctgcagggggatcccagcctcagagagggactggggggacttcccggttcccaggctccagcctcttgcagctcaggactcaggaagagaccacgtggctccagcctttgctggggctgagctctctgcctgggtggctcttcccacctggtcgataaatgtctggcttgcacctagctcctgggaaggtgggtttgccattctggcctgtgaccccaaatgtccacaccagggaccttcactgcagactccagggtctgcggtggggttacagctgcatgtttaacaagcatttgcctcgggaccctgttttgagaggatgcctcccacatcagactaggggctcttggttggcgagtggcacagaacgaatgaataagattctccgcactggaggatgatggttttttttttttttttttttttttttcctgagatggagcctcgctctgtcacccaggctggagtgcagtggtgcgattttggctcactgcaacttcggcctccgaggttcaggtgattctctttcctcggcctccccaggggctgggactgcaggcgcgcgccaccacacctggctaatttttatgtttttggtagagacagggtttcaccac[138 bp omitted]ggtgttgggggatgtctaggagtttgccagatggggccggtatgggagagtggatcaggagagaacatggcttgaggttaggtcctggtgggtggggtcaggcagaggagccaaggggaggctgaagctgagggctgcagacccgaaggccaggctgaggaactctgctggcctctgagatgtgattaatcccagatcagcctggctgggtggtcctgaactcactgccacatacccctgctccctccagacccccctctggcttctgggagaaggacagtcttcaaaaagtgcctggcctgggcatgagacggcccaggaccccccacccccaacctcatctggccctggggacggaactcaggcccccttccgttctcgctcgcataaaagccaccctggccgagcatttccagatgtgcctgtgagccgctgtgccggggccgcccaggtgcggcccacatgccctgcaagggctgcgtggcgggcgctggccatcccctaaggagtgccgcactgccttggaagtggggctccctcgtcagccccactttacacacagagaaactgaggctggcacataaactcaacagctgtgttcagaggccctaccagacccccagataacagaaagggggttggtcatctgggtcctggctgcagctttcaaactgaggtgcttgggcccctgcactcatagctgcgacccggcctcagtttccccatctgtaaaatgatgacttgggaagatgcgataagcctaggaggcgatgagcattcacattgaaagcgggggcggggaccccagagagagcttccctagcaggacctcaatatccctgtctgagcagcggggctgcggggcagctcctggttcagaggcctagggctgtggggggccccctcccctggaatcgctccccaggccaggagggccgtccagcgccccgccctccccgacgcctcctgggggaaggtcctggcagccccagactcgcgcctggcaagggcggaacaccccaggctgacgcagctggggcccctccggccttcccagaagagcgcgtgcatcgggagcagacgtcagccagctgcaaggaggagcggcccggggctgcgtagctccgctggaccccgattccgggcagagacccccccccgccccggcccgcgcgcaccgagcccagcccccgccccccagcgcaggcgcagcgcggacctcggccccaccggtcccgcgcccggaccctgagccctgcccctgggaacccgagggccccgactccgactgaccctgacctgggacggcgcccccgcctccgccctgcagaaggggcgcagggaggggccccgaggccttcgcgcggccccacgcccgggaccctcccgcgcccggccccacgcgcgtgtcctctgtccgcagattcgtgcgacggcgtggagtgcggcccgggcaaggcgtgccgcatgctggggggccgcccgcgctgcgagtgcgcgcccgactgctcggggctcccggcgcggctgcaggtctgcggctcagacggcgccacctaccgcgacgagtgcgagctgcgcgccgcgcgctgccgcggccacccggacctgagcgtcatgtaccggggccgctgccgcagtacgtgggggcgtggtctgtggaggggcggggcgggacctaccggacctgcgcgtcatgtatcgaggctgctgccgcagtaggcgggggcggggcctggggcgggaccacccggacctgagcgtgacgtatcggggctgctaccgcaatgcgtgagggccaggcctgcgggggcggggcctgctggaggggcggggcctgctggaggggcggggccgctgccgcagtgcgtaggggcggggcctccagcccaggacaggtcacatgggtggcggtggggcctgagtaagggcgtctttatacttccgagggagtatcacggggtagggtcttttgtagggttgggatttggaaaatagtgggcctctgggggctcacactgggcaagaggtatgtggcatggtcagagcgggagcgtgactcagagaggggcttgtgggtgtaaccagaggggcatgatggaaccaggggggtgagactgggtcatgtaaggggcggggctcttggctggggcgtggttcctgggtggagatgggcggggatttgtgggtggagtttgggtgggcggccccgcagtcgcggaggggcggggctttgggtagcataaggggcaggagctcacgaaagaggtgtggctcctgggtacaatgggaagggcagggcttgtgggtggagcctgaggggtggaatggagaggggggctcacggggggcgggggggtgcttgtgtctcctaccagagggttttcgcatcttgggggttaagggtgggtcttggggccaagagccctgcggggttctcagcgagatgtcccctgaacttcccctggcacccggcctgcagagtcctgtgagcacgtggtgtgcccgcggccacagtcgtgcgtcgtggaccagacgggcagcgcccactgcgtggtgtgtcgagcggcgccctgccctgtgccctccagccccggccaggagctttgcggcaacaacaacgtcacctacatctcctcgtgccacatgcgccaggccacctgcttcctgggccgctccatcggcgtgcgccacgcgggcagctgcgcaggtgcagacgcagggcgggggcacaggcctgtcctgggggccggagaaccccctgccctgcgccctcaatgctcttatcgacccttgcaggcacccctgaggagccgccaggtggtgagtctgcagaagaggaagagaacttcgtgtgagcctgcaggacaggcctgggcctggtgcccgaggccccccatcatcccctgttatttattgccacagcagagtctaatttatatgccacggacactccttagagcccggattcggaccacttggggatcccagaacctccctgacgatatcctggaaggactgaggaagggaggcctgggggccggctggtgggtgggatagacctgcgttccggacactgagcgcctgatttagggcccttctctaggatgccccagcccctaccctaagacctattgccggggaggattccacacttccgctcctttggggataaacctattaattattgctactatcaagagggctgggcattctctgctggtaattcctgaagaggcatgactgcttttctcagccccaagcctctagtctgggtgtgtacggagggtctagcctgggtgtgtacggagggtctagcctgggtgagtacggagggtctagcctgggtgagtacggagggtctagcctgggtgagtacggagggtctagcctgggtgtgtatggaggatctagcctgggtgagtatggagggtctagcctgggtgagtatggagggtctagcctgggtgtgtatggagggtctagcctgggtgagtatggagggtctagcctgggtgtgtatggagggtctagcctgggtgagtatggagggtctagcctgggtgtgtacggagggtctagtctgagtgcgtgtggggacctcagaacactgtgaccttagcccagcaagccaggcccttcatgaaggccaagaaggctgccaccattccctgccagcccaagaactccagcttccccactgcctctgtgtgcccctttgcgtcctgtgaaggccattgagaaatgcccagtgtgccccctgggaaagggcacggcctgtgctcctgacacgggctgtgcttggccacagaaccacccagcgtctcccctgctgctgtccacgtcagttcatgaggcaacgtcgcgtggtctcagacgtggagcagccagcggcagctcagagcagggcactgtgtccggcggagccaagtccactctgggggagctctggcggggaccacgggccactgctcacccactggccccgaggggggtgtagacgccaagactcacgcatgtgtgacatccggagtcctggagccgggtgtcccagtggcaccactaggtgcctgctgcctccacagtggggttcacacccagggctccttggtcccccacaacctgccccggccaggcctgcagacccagactccagccagacctgcctcacccaccaatgcagccggggctggcgacaccagccaggtgctggtcttgggccagttctcccacgacggctcaccctcccctccatctgcgttgatgctcagaatcgcctacctgtgcctgcgtgtaaaccacagcctcagaccagctatggggagaggacaacacggaggatatccagcttccccggtctggggtgaggaatgtggggagcttgggcatcctcctccagcctcctccagcccccaggcagtgccttacctgtggtgcccagaaaagtgcccctaggttggtgggtctacaggagcctcagccaggcagcccaccccaccctggggccctgcctcaccaaggaaataaagactcaagccattttggggtgtccaggcctcagtttgtctcctctctcaaggcttcaggccgcccccacggctgtgggatgggcagcctggggcctggggtgccgcatgggtgctctggaggcacgggaagagagacccagcattagtccttgggcagcctctggccgcctctgggcctcagtgcctctccaggcagtggacaagcccgggaggggctgaggcagagcgggaggggagggagagaaaggaggtcttttgggagggcacacaggatagacaagatggcttagggcagccctaagacaccagctggcttgggacccagaaatggaggcccggtcttgaatgacttgggtgtaacgatagcagtaataaaaataacaggattagggcccgggtggggtagctcacccctataatctcggcgctttgggaggccaaggcgggcgggtcacttgaggccaggagttccagaccagcctgggcaacatagtgagaccctcatctctacaaaaaaaaaaaaaaaaaaaaaaaagacccaggcatggtggcatgctcctgtggtcccagctactcaggaggcggaggtgggaagatggcttgagcccaggatgtcaaggctgcagtgagctgtgttggcaccactgcactccagcctgggtgacagagtgagac[133 bp omitted]aactccaatctcggtgagccgagatcgtgccactaaactccagcctgggggacagagcaagaccccatctcaaaaaaaaaaaaaaaaaaattagccaggtgtggtgtcatgcacctgtagtcccagctacttgggagggtgaggcaggagaatcgcttgaacctgggaggcagaggttgcagtgagccgagatcgcaccactggactccagcctgggtgacggagtgagactctgtctcaaaataataataataataataataataacaacaacaacaacaaaaaggcccagcgcggtggctcacccgcgcctgtaatcccagcactttaggaggccaaggctagcggatcacgaggtcaagagatcgagaccatcctggccaacatggtgaaaccccatctctactaaaaatacaaaaaattagccgggtgtggtggtacatgcctgtagtcccagctagttgggaggctgaggcaggagaatggcttgaacccaggggcagaggttgcaatgagccgagattgcgccactgcactccagcctggtgacagagtgagacgtcatcttaaaaaaataataggccgggcgcggtggctcacgcctgtaatcccagcactctgggaggccgaggtgggtggatcacgagatcaggagatcgagaccatcctggctgacacggtgaaaccccgtttctactaaaaatacaaagaattagccgggtgtggtggcgggcgcctgtagtcccagctacttgggaggctgaagcgggagaatggtgtgaacccgggaggcggaacttgcagtgagccgagatcgcaccactgcactccagcctgggggacagagcgagactccatccaaaataaaaataagtaaagataaaaaaataaaataataataaagaaaataaaatctaaaaataaaaaaataataacacaataacaaactgtgacaataacatcacctgggacttgctgtgcaccccgcgctattctctggttttcagaggatgaccacgaggcttgatgtgtggccagaccctcttgggactcctcggcgcggccggtgcaagcccgccctggtgtccagcagcccccacgccctgcacagggagctcagggcttcctggcctccgtttcccagcggactcgcctgcggtgtggttaggcggctggagggaggtggaggaacggcattccaggtgggaggctgcaggagtgtgggttgcaggggcgcaggggtagacccagaggggttcacggtggggggcatgggaaggtggaaaggggctgcggaccgagccgcgacacgaatgccggtggaccctgcagctgaccgcccacgggtgaggctggaagtcagttaacattttactgggtttgcttctgccctttgcatgtggaatgggtgtgccccaccgctgcccgtcccaccccaaccctgaacatcaggcttcccgtggggcccagccacggaacattccaggcctggagcggccatctcatttgcatgccgcaaggttgtggctcaggcggcttctcctgggggcctggtggtcccaggcagggggccgggctggggactgctccgccgaaccacgtcccagatccaggccacaaaggcggacacctgcgtgtacacgtcgggggtcttggggtcgccgcaccagaggcccgagaaggaaacgaggccgtgagcccggttcctgcacaccaggggccctccggagtcggcctggagtgaaaggagaggtgaggtcagggcctctgggagctgctgcaggcacatctcaccacggccctccctgcctcagaaccctctgtggctccctactgctctccaaggaaaaagtaaattcatttctcccctccaggccctgaggacccagcccccacccacttctctgccctccccgctgagcctcctcagtgctccacggcctttgtatagcctggagacctgttcctgccctgcgctggatgctgcctgtgtgaacattcgagtctgcagtgttttgggcagtgcacaacctacacagctgtacgcggcagccctctactaacaggtctctctgccttgcgtgtgtttcctcagatcttctaaggattccttcaagtctcagctcaaaggtgctctccttggagagggctccccgtatactcaccctaaaatccctcatcctaccctcctgccatctagaatccgctctgataccatcaactggatactaatagtgtagcagttttacagatggagaaaaagaggcccagagaaatcaagtgacttttccaaggtcacgcatcgggaaagtggacagtctcatttctcctggactcgggctgctgggctaagtgtgtgtcctgaaccaagtcgctctcttgcctgcggtaaaagaccctccagggccagtgtctcccttggcacctggggattcgtttatctggcaaggttttaggagtgggagctgcttcctctcaatctgttactaccctctactgaatactgcttgtataaatacacaagtgcttggctctttgtgcagtgcgcaacctgcacagctgaacatggcagccctgcatgacccttgccaactccctgccttccctgggcctcagcttctccgtctggtccaacatcaatgggactcagttcccaaggcccttcctggccctgaccctctctgtgggccttggtttccccacacagtaagtgggtggagcagggaggggatcttaccgagcagaagccccgtctgtggctgtccccactgcgggtgcagagcatggtaagtgtcaggtggcccttccaggagctgttgcagacgtccgggtccagcactcggaccttggcctccatcagtccaggcggcagctcctcaaagtcagacacgaagccccagccagccacccggcaccgtgtccccgctgtggggggcctggcccttctccctggcggcctcagcagccccactgcagggcccaggacagcagagccgttcagctgcagggagagcatgagttcaggccactgggctccctccccacccccgctcctgcctcagtttatccatgggacccctggtcctgcccttgtgaagcaaaatcaatggcggccaccatgaggccgggtcaggaggccccgttccttctgccaacacaggcccctacccctcaggcctccagggtcaccgt[137 bp omitted]ctgcctcagcctcccaagcagctgggattacaggcgtgcaccaccacacctggctaattttggtattttagtagagacggggtttcaccctgttggccaggctgttctcaaactcctgacctcaggtgatccacccacctcagcctcccaaagtgctgggattacagagtgagccgccgcgcccagcctcaaagagtctttcaaactccatctccttccttactctaagccctcccacggctcccgattgccctcaagacaaaacctctttgctcaccagccagggcctctgagggctctccagcctcagcctcccctttggccaggcaggatgaatttacagctactccctgggcctgccacacacctcccctcacaccagacccccagcctgaaacacttttcctattcagccatctcagcatggatgccacctcttccaggaagtcttcccagactcccaggctggcacgtgagtcttctctgggctccctgcagcctgttgaggccggtttacccagtgaagactgagtgacaccccgggctctgtgtggcccagcaccgggcctctggccctggccctggcaattggcacacagctgatgctcagttaatgggcctgggaaggacggctccaatccctgtctctggttctctgatttgtgcgtcttgggttcattcctgacattcttgatgtctcgctcagcctcagtttccccatctgtgcgatggcctctgggtgaaccagcgctggttccaggcttcagggtttcacagatgagaaaaattcacccaaaagctttggctactggcacttgctcctcctccttttttttttgtttttttcagagtcttgctctgttgtccaggctggaatgcagtggcgcaatctcggctcacggcaacctccgcctcccgggttcaagcgattctcctgcctcagcctctggaatttaattttgggatgctgggtagaagcgtcagggaaggggtcgtccctcgagcaggagggggccaggcgggtctgcatggatgcaccacgtgtgggaggagcagcttcccacccggaggactccacccagggacttttttttttttttcagatggagtctcactctgtcacccaggctggagtgcagtggcacgatctcggctcacggcaacctctgcctcccaggttcaagtgattctcctgcctcagcctcccgagtagctgggatgactggcacccaccaccaggctcagctaatttttttatttttagtagagatggggtttcaccacgttggccagtctggtttcaaactcctgacctcaaatgatctacccgcctcggcctcccaaagtgctggggttacaggtgtgagccaccacgcccggccccacacagggactttaagcgtctcctccacacagggcaggggcccgagaggcacattcattccatttcagcataaactttgagcgcctgctgtgtgccataaatggccataaaggtgataaaaaatccctgcccgttaggttcagaggaagcgggaatgaggaagcgggtggtccaggggttagcaggtgacaagcaggtgacgacggggccggaagggtggtccaggggttagcaggtgacgacggtgctagaagggtggtccaggggttagcaggtgacgacggggctggaagggtggtccacaggttagcaggtgacgacggggtggtccaggggttagcaggagatgacggggccggaagggtggtccaggggttagcaggtgatgacggggctggaacagggttgcagggagggggtatgtggtccagggcggcctcctgggaaggtaacatttgagcaaagacttgacaggcgtgaggggaaaggctcgcggtgtctggggaactggtgcactgggtacagctggtgcagagctcggagcggagactgtgctggggatgggatggcccatccgggaggtctgctggcctcgagtcagaaaggtgacaggcatggattagcagggcctgtgggcaccaggaggatttgtcctgcaggaggtgggagccactggggggtccagggcacaggaggaatgggacctgacgtccaactgtctttaaaacctaagtcaggccaggcgcagcagctcaggtttgtaatcccagcactttgcggggctgaggcaggaggattgcctgagtccaggaggtcaagaccagcctgggcaacatggtgaaaccccgtctctactaaaaatataaaaattcgcctggcgcagtggtacacgcccgtgatcccgacactttgggagaccaaggtgggcggatcacttgaggaccggagttaagaccagcctggccaacatggtgaaatcccatctctactaaaaatacaaaaattagccaggtgtggtggtgggtgcctgtgatcccagctactcgggaggccgaggcaggagaatcgcttgaacccgggagatggaggttgcagtgagccctgactgtgccactttactccagcccaggtgccaaagtgagactccgtctcaaaaaataggccaggattgggaggcagaggtgggcggatcacgaggtcaagagatcgagaccatcctggcaaacatggtgaaaccccatctctactaaaaatacaaaaattagccgggcgtggtggcgggcgcctgtaatcccagctactcggggggctgaggcaggagaatcgcttgaacctgggaggcagaggctgcagtgagccgagatcgtgctactgcactccagcctggggacacagggagatactgtctgaaaaaaaaaaaaatagcccagggctgcttctcctggaaaacactaaacggcggatgacgtcggtgcagtggggcggccctgggatggggaacggcgctggcttcccccgaggcttcggcactggcttccgggctggggccgcggagctcacagaggcaagacagaggataaggagtagacgcctgtcaccaagctgggccgcctggtcaaggacataaagatcatgtccctggaggagatctgtctcttctccctgcccatcaaggaatctgagatcattgaccttttcctgagggcctctctccaggacgaggttttggagattatgccggtgcagaagcagatccgcaccggccagcgcaccaggttcgaggcgtctgttcccaccggggactacaatggccacgtcggtctgggtgttgagtgctccaaggaggtagccactgccatcatcggggccgtcatcctggccaagctctccgttgtccccatgcacagaggctactgggggaacaagatcggcaagccctacaccgtccctggcaaggtgacaggccgctgcggctctgcgctggtgtgcctgatccccgtgtccggggcgctggcatcgtctgggcgcctgtgctcaagaagctgctcatgatggctggtatcggtgactgctacaccttagccaggggctgcactgccaccctgggccactttgccaaggccgcctctgatatcctctctaagacctacagctgcctgacccctgacctctgtattccccaagtctctctttcaggtattcactggccatcttgtgaagactcacaccagagtctccgtgcagacgcccggctccagctgtggttacaacatagggttttatacacgaaaaataaagtgaattaagcctggaaaaaaaaaatggccaggcacgatggctcacgcctgtaatcccaacactttgggaggctgaggtgggtggatcactgggtcaggagttcgagaccagcctggccaacatagtgaaaccccatctctactaaaaacacaaaaaactagccaggtctggtggcgagtgcctgtaatcccagctacttgggtggctgaggcaggagaatcacttgagcctgggaggcggaggttacagtgagccgagatggcgccattgcactccagcccccgtgacagttcgagactctgactcaaaaaaaaaaaaaaagaaaagaaaagaaaagtaggccgggctcggtggctcacgcttgtaatcccagccctttgggaggccgaggcaggtggatcatttgaagtcaggagcttgagaccagcctggccaacatggtgaaaccccgtctctactaaaatacaaaaattagatgggcttggtggcgcgcacctgtaatcccatgtacttgagaggctgaggcaggagaatcacttgaacccgggaggctgaggttgcagtgagccgagattgcgccattgccctccagcccgagcgacagagcgagagactgtctcaaaaactaaacatacgtcagatccacccccggggctcacccgcagcaggcagatgtcgttggcgtgggtcatggggtggtagtcggggtgtgtggtgagagcatcgatgccaaacacctgctgggtgggctccgcagtactcaggacgtgggcgcccagcaccaccaggccagtgcggaggtctctgcagggaggaggtggtgggtgagacgggggtgagggctgccc[137 bp omitted]acatggagaaaccccgtctctactaaaaatacaaaattagccaggtgtggtggcacatgcctgtcatcccagctactcgggaggctgaggcaggagaattgcttgagcctgggaggcggaggttgcagtgagctgagattgcaccattgcactccagcctgagcgacagaacaagactccgtctcaaaaaaacaaaaaaaaaacaattacttttgcatcaacttaatattcttttccttttttctttttttttttttttgagacagagtctcactctgtcccctaggctagagtgcaatcgaggcttactgcaacctctgcctcctgggttccagtgattctcctgcctcagccctccaagcagctaagactacaggcgtgcgccaccactcccagctaatttttgtattttcagtagagacagggtttc[142 bp omitted]tattatttttcctacctccaatatagaattaactgcaatagttgtggtattaatttgaatcattattataaaaacatatttagaatgaagataatacttattatatttattataagttctatttcaattataatattaactacagtaatttcaatattctcctttttttatttctttaatttttttttttgagacggagtctcgctctgtcacccaggcaagattgcagtggtgcaatcttggctctctgcaagctccacctcccgggttcacgccattctcctgcctcagcctcctgaatagctgggactacaggcgcccgccaccatatccggctaattttttgtatttttttttagtagagacagggtttcaccgtgttagccaggacagtctcgatctcctgacctcgtgatccgcctgcctcggcctcccaaagtgccgggattacaggcgtgagccaccgcacccggccttttttttttttttttttttgagacaaggtctcactctgtcacccaggccgcagtggtgtgatcacagctcactgcagcctcgacctcccaggctcaagcgatcctcccacagcagcctttcaagtagctgggaccacagaagcacagctccggtgcggaggactctgcggggaggagggggtgggtgagatgggggtgacggctgcccgtctgggcctcagtccactcatctatgaaatggaggcccagtaatccatttaatgctcacgccggccccgtgataatattaggttggtgcaaaagtaattgcacgaaaaaaattaaatggcaaaaaccacaattaacttttttttttccgacagaatctcactctttcccctaggctggagtgcagtggtgccatctcggctcactgccacctccacctcctgggttcaagtgattctcctacctcagcctcccgagt[131 bp omitted]tcccgggttcacgccattctcctgcctcagcctcctgggtagctgggactacaggcgcctgccacc[175 bp omitted]ttcaccatgttggccaggctggtctcatactcctgacctcaaacaatccaccgtgtcccaacgtgagggggactgcaggctggcgggggagctggggacactgcagcccaggaccaacctatcccgtgcctggtgggggctcctgcaggaggggacccacccaccctggccccaatatacattttaatagttattataacaatatgtttaaaacgaggcagggcatggcggctcacacctgcaatcccagcactttgggaggcagaggcgggtggatcatttgaagtcaggagttcgagaccagcctggccaacatggtgaaatccagtctctactaaaaatgcaaaaattagccaggtgtggtggtgggcgcctgtgatcccagctactcgggaagctgaggcaggagaatcgcttgagcccgggaggtggaggttgcagtgagccgagattgcaccgttgcactccagcctggggaaccgagactgcctcaaaaaaaaaaaagaacatagtgacagttacagtaacagaatatgtacttgttgcgcctgttgcttcttctgtgcttcttttgcctccctgccttatcctcctgttttccctttgttgccctttaaatccagcccctgctgagactccccctcctgcaggagccacggcgcccccagctcccccaccagcctggagtccccctcatgtcgggatacggtgtccagaaagaaggggcccgacaggtgagctcacctgtggctgaagcagtgggcggccgagaccacccagcgggctcgcagcaggaagcctccgcagtgatgttggcccccgaagcgcacggatgccatgtagggcctggagtggggggtcacctcgtggcccccgatgatctgggccccccaggagcctgctggagggacggcctgagtcagggacgaggcgggaggaacggatgacggggctggggtcagggcagggggagaagtagcggccaagacagagacagggggtgagattagagacggagagacccagagagctggagacagagcccagacaagccccccagatgcgctgggaggggctcccgagcccgggagatccagggctgggctgggcagagaccccggccggatttccatccatttccagcagaggcagccacgggggctcggcagatggagcaggtggagctctccccagggttctcccgggactgggggttcccgggtgtggcccccgtacggggacttggcgggggcctgggtggggatcccggggggctcctcaccggggggcttcacgggcagcatcagggcggtggccacagtcagcagaggacgtccccagcccctcaacccgagccccatggcagacgcaggctggcgtctccccgcagaggtcttcgggccgtggctcccaccctcagccaacggccggaaagggggagcctggctgtggcctgtggtcgggaggccccaccagcaacgcctggagcccaggcgggcgtttctgagaaatcgatggtctcaggtggtggctggtaataatcatgttgataataatcattgtcccctagtccggaaacagggagaggaggagacagctctggggctgcaagtgacctcgggaaggcaattgacccttctgtgcctcagtttacccagcctccacgtggcccagcatgtgtggggagctttccgaggaaccgaggtcacagcggcactcgagacccgcagctcgcctccggcccccaccccgcaaaccccagtcttcccatctccaaacccagggccgacctcagggctgtggggacagcgaggaaggccggtctcctgggaagctctgatgatttctgcctttattttattttatttttataggtggggttttgctatgttgcccaggctggtctcgaactcctgggctccagcgatcctccctcctcggccttccaaagtgctgagatcacagaagacagccactgcacctggcagatttctgcctttattcagcagttattgagtgcctagtgtataccagacctcatgctaggaggtgaggatgaggcagtgaccgcaccccagcctgtagcactgacgttctgtgggatccggagtccagtgggacatggctgtacatgggggtcttcaccttttttttcttttctttttttttttgagatggagtcttgctcttgttgcccaggctagagtggaatggcaccatctcggctcaccgcaacctctacctcccgggttcgagtgattctcgttcctcagcctcccgagtaactggaactacaggcgcccgccaccaca[175 bp omitted]aatcttgctcttgttgcccaggctagagtgcagtggcgcgatcttggctcaccgcaacctctgtctcctgagttcaagggattctccttcctcagcctcctgagtaactgggattacaggtgcccaccaccacgccccgctaaatttgtgtgtttagtagagacggagtttctccatgttggtcaggctggtctcgaactcccgacctcaggtgatccacctgcctcagcctcccaaagtgctgggatgacaggcctgagccaccgcgcccagcccggcaggtcttcacctttcagtgggagcgttcttagtggcaaagttcaggtcgtaaattgcagctcacacagccgggtgatggcgttcacggcagtggctagcagtggggtgctcgtcagcgcttaataatgaacaggctggggccgggtgcagtggctcacgcctataatcctagcactttgggaggccgaggcaggtggatcacctgaggtcaggagttcaagaccagcctggccaacatagtgaaaccccgtctctacttaaagtaccaaaattagtcaggcgtggtggcaggtgcctgtaatcccagctacttgggaggctgaggcaggagaatcgcttgaaccgggaggtggaggtggcagtgagccaagattgcaccattgcactccagcctgggtgacagagcgagacaccatctcaaaaaaaaaaaaaaaaaaaaagtcatcattgaacgctccagacctgtgttttaccaaatgtaaagtgttctcaataaagaatgaagtgaaatgaagcaacaggaaatgcgtggaaaggaaggtatgaaaaggccccacaacgaactcgggctctgcgagatgcgggcggcctctggaagctaaaaaacggcaggaaacgaattttctcctggagcctccgggaaaagccagccctaccgatgccctgacgttagcccagaagggcctgcaggggcttctgacctccagcactgccagagaataaattggtgccatttcgtttattattattattattatattttcttgagatggagtctcgctctttcgcctaggccagactgcagtggtgcgatctcggctcactgcaagctccgcctcctgggttcatgccattctccttcctcagcctcccaagtagctgggactacaggtgcccgccaccacgcccggctgatattttgtatttttagtagagatggggtttcaccacgttagccaggatggtctcaatctcctgacctcgtgatctgcctgcctcagcctttcaaagtgctgggattacaggtgtgagccaccgcgcccagcctcatttattatgtatatatttattttgagacagggagacagggtcttgctctgccgcccacgctggagtgcagcagtgcaatcaaagctcactgcagcctcgacctcctaggctcaagccatcctcccacctcagcctcccaagtagctgggaccacaggcacctgccaccaccaggcccggctcattatttcattttttgtggagacggggttttgccatgttgcccaggctggtcttgaactcctggcctcgagcaatcctccagcctcggcttcccggagtgctgggattacaggtgtgagccaccatgtctggcccaagttggtatcattttaaaccactacgtttctgggaattcgttacagcagctgcaggaaagattttgggaaatggaaagctgtttccagggcctggggacaggtgggaccccagctcagggtccgtgtacttggggaccatttcctgctctgctgtggtctactggaccgtctggcatcgctgtgaccgcatgggccgtgctccatcaatattgtttttttgtgtgtgggtgtttttttttttttttttagatggagtctcgatctgtcgccaggctggagtgcagtggcgtgatctcagctcactgcaacctcagtgtcccgggttcaagcgattctcctgcctcagcctccccagtagctgggactacaggcgtctgcccccacgcccggccaattttttgtatttttagtggagatggggtttcaccatgttggccaggctggtcttgaactcctgacctcgtgatccgcccgccttggcctccgaaaatgctgggattacaggcatgagccactgcgcccggccctgtttttatcttttagagacagggtctccttctgtcgcccaggctggagtgcagtggtttgatctcggctcactgcatcctctgcctcctgagttcaagcgatcctactgccttagcctcccaagtaggtgggattacaggtgcctgccaccacgcccggctaatttttgtgtttttttgttttgttttgttttatttgtttggtagagatgggtttt[141 bp omitted]ctggtctccacggtcgtcgcgtcagcacgagtgggtcccctggacttgctcctacctcccctgctgccctccgtcgcggagcactgaggcagagacctggaaaacgtccccagctccacgggcgttagaaggagaattgcccgaagctgcaggcgtgtggaactttgttccctcacgatgctgtccctgtcccggtcgctgatggggacacagtagggagagggtaagcgccttagccctgccacacagtgaggagccagggggccggggctgctgcctcagaggagctcccactgcctctcgggaccgattctatccagagctgggccatttccttcccttttggtgaacagttgtgaaataaacaaccgtcctccagcgtctcagaaaaccgagctcctggcagccctgaggagggggctgagtgggggtcactgttcccacttcccaaactgaggcccagagaggggagccgatttgtctggggccacacagcacagggtcttgacccatgagccgctggactgcgattctcctggagggtctctccatggcagatctgagcggctcttcaggagctcagacaccagccactgcagggagtcaacagcaatggtgacaacagcttcctttattgtatttaattttacatttttattttatttattttgtttttttgagacggagtctcgctctgtcacccaggctgcagtgcagtggcaccatctcagctcactgcaagctctgcctcccgggttcaagtgattctcctgtctcagcctcccgagtagctgggattacaggcgcccaccaccacgcccagctaattttttgtatttttagtagagatggggtttcaccatgttggccaggctggtcttgaacttctgatggcaggtgatccacccgcctgggcctcccaaagtgatgggatgacaggcgtgagccaccgcgcccggcccctcccctgcgaaaaattgtttttcaagacgagatgttgcctggtggctgagactgcaatcacagctcactgcagcctctgcctcctggctccgccttccctgtagctgggaccacaggctcacaaaaccaccagggtaattaaaaaaaaaaaaaaagctag[139 bp omitted]gtggcgggcgtctgtagtcccagctactcgggaggc[136 bp omitted]tctcactatgccgcccaggctggcctcaaactgacctcgactgatcctcccaccttggcttcccaaagtgctggtgtaataggcatgagccactgagcctggcctcactttatttttatttttttgagacagatgctttgtcacccaggctggagtacagtggtgtgatctctgcttactgcaacctctgcctcccaggttgaagcgattctcctacctcagcctcccaagtaggtgggactacaggtgtgtgccaccacacctggctaatttgttttgtatttttagtacggacaggatt[133 bp omitted]tatccacaggacattgcttcttcttttttttttttttttttgttgttgttgttgagagggagtctcgctctgtcacccacgctggagagcagtggcgcgatcttggctctcagcaaccttttcctcctgagttcaagagattctcctacctcagtctcccaggtagctgggattacaggcatgcgccaccacgcccagctaattttttttttttttttgagatggagtttcgctcttgttgcccaggctggagtgcagtggtatgatctcagctcactgcaaactctgcctctcgggttcaagcgattctcctgcctcagcctcctgagtggctggaattacaggcgcccaccaccacccccagctaattttgtatttttagtagagatggggtttcgccatgttggtcaggctggtcttgaactcccaacctcaggtgatctgcctgccttggcctctcaaagtgctaggattacaggcgttgccaacgcgcctgatctttttttgtatttttagcagagacaggttttgccctgttagccaggctgctctcgaactcctgacctcagaggatccacccgcctcagcctcccagaatgttaggattacaggcgtgagtccccgtgcccggacctgcttcctatttcttgaaatggaagatagctgccttaagaatacacattgcactggctggacgcagtggcttgcgcctgtaatcccagcactttgggagactgaggcaggcggatcccctgaggtcaagagttccagaccagcctggctaacatggcaaaaccccatctctactaaaaatacaaaacttagctgggtgcggtggtgtgtgcctgtaatcccagctactcgggaggctgaggcaggaggatcacttgaacctgggaggaggaggttacagtgagccaagattgcaccgttgcactccagcctgggcgacagagtgagactccatctcaaaaaaaaaaaaaaaaaaaaaaagaatacacatagcacaacccaacactacctgccttccagccagactggagagggctggcttggccgctactgggggtccctgagctgtccaaaggccctgctccccggagctctctggcctcagttttcccatctagggaatgggttgccctggggcaatgccgagagtgctgatgagaattcagcaaggttggctgggcacagtggctcacgcctgtaatcccaggactttgggaagttgaggcaggcgggtcacctggggtcaggagttcgagaccagcctggccaacatggtgaaaccccgtctctactaaaaatgcaaaaattagctgggggtggtggcgggcacctgtaattccagctacccggaaggctgaggcaggagaactgtttgaacccaggagatgcaggttgcagtgagctgagatcgcgccactgcactccagcctgggtgacaagaacgagactccgttggaaaaaaaaaaaaacagcaaggtactggatgcggcatgctggtggggactggggccctggcgccccttgtaaagcgcctgtttgcccatccgtaagctggatcctgccccgtccttcccatggaagccatcacagtcagagaagagggtagaagacaggaaaccatccattcattcactcaactcattccgtgagcatttattgagcacctactgtgtacagacagtgttgtgggccttggggactcagcagtgaagaagacaggcaagttcctgcccttgtggggctgacattcagcagagaggcaggaaggaaacgctgaacacaacatgtaaatgacattgtctgtcagaagaatt[137 bp omitted]acacggtgaaacctcgtctctactaaaaatacaaaaattagccaggcatgatggtgggcacctgtaatcccagctactcaggaggctaaggtggaaggatggcttgaacccaggaggtggaggttgcagtgagctgaggttgcgccattgccctccagcctgggcaacagagcaagactctgtctcaaaaaaaaaaaattagccacgtgtggtggtgcacacctgtagtcccagatactcaggaggctgaggtgggaggattacctgatgggggaggtcgaggctgcagtgagccaagatcacatcactgcactccagcctgggtggcagagtgagaccctatcttattcaaaaaaataaaaacaacaagggtaccgagggcacccagtgacaatggggaagctggggaagttctcccagaggaacacacaaggcgtctaacagcaggtgtctggatggctgaagcccaagctggttgtggggcaaggagaggtgagcagggaagagacaggattgtctgggctcagctttgccttgtggggctgcagggcactggggaaccatagatggtgtttgagctggggcaggccagggcatatttctctggtgaaagagtggagtagggagaggaggtggggagacccggaggcgacatggctcagggttggggtgggggccataaggcctcagctaaagtcatggctggggagaggcgaggggggtctctgactcagggacaggggaggagtgaggttttgggacccacctatagcttccggtcgtccaaggctccagagggtggccagatctgcaaggagtggtggggcgtgctgggcggagccccggggtagagctctacggaagtaggaagggcaggggcgccctcagggaaacctcactcctcccctgtccctgagtccaggaaggggtcaggccaacgtcgctctggaagcctggaggcggggccgaggtgcaggggcggggccgacattgcctgggaggcggggctgaggtgcaggggcggggcctacattgcctgggaggcggggctgaggttcaggggcggggccgacattgcctgggaggcgaggccgaggcacagggggcggggccaatgtgcaggggcggggccgacattgcctgggatgcagggaggtggggccgatgtcgggggcggggccatggtgcagggggcggggtcggggcggggccgagatggcctaggctgctgggaggcgggactagggtgcagggtgcgaggctagcggggtgatgcgggggccgagattgcccaggaggcgggtccgaggttcagggggcggggctagggcgcagggggcggggccgacattgcttcggaagctgggagtggggaccgaggtgcaggaggcagagcctcagtgcagtgactgctccccacaggacgcggatgggcgctgcagtgcctgtgggtgggtgagcgcagtgaggcggtggaagtgagggtgtgaagggcaactcgaggcagcttctctccggtccactacacaccccaccttgtcccacctccacacctttgccaggccgttccggccacctggaacgtctccctccaccgtttgcccggcccatttccccggttcaagtggcatcacctccaggcctgtgtgtgctggagtcgggaggtgtgggcggcgcgagtttttcgtgcagggccttgagagtggcaggaggactttagcttttgctcggagggaggtgtgagtcctggaggtttagagctggggcggtgggagaaatgatcccagcagtcccttaccctccccacggcctcctcacttcctcctatttttacacaaaatgcctccaccacccttcaaaccctgaatcttttattttattttatttttgagatagggtctggctctgtcacccaggctggagtgcagtggtgtcttcacagctcaccgtagcctcgatctcctgggtccaactgatcctcctacctcagcctgtgagtaactggaactacagatgcatgatacctcac[174 bp omitted]gtgtcaggagcctgtagtcccagctactcgggaggctgagacaggagaatggcgtgaacctgggaggtggaaattgcagtgagccgagatcaccccactgcactccagcctgggcgacagagtgagactctgtctcaaaaagaaaaattacatttaaaaatgtatatatggctaatgactgctgtaccgaacaaaccagtccccaaaagcaaatgaaataacagctgccaccaagtaccacggtcacacctaaaaaccaattaacacctcgacagctcctcacgcaggttccgtttactcgggagtaggagccggccacccgatgcagggtcactatgaccccccaagcccgtgcctcgccctgtctcttcttcctccttataattaaaatcttgaaggaccccgatggcagcctgtcccaccgccctgcctgggtctggcccctgcagcttgtgatgcttctcagacccattcccagccctccggggagtcacagaggggtgagatcagacagaggtttgaatccgggggtggcctttccttggatggagcagtatttaaaaaaaaaattgggccaggtgcggtggctcatgcctgtaatccc[131 bp omitted]aaaaaaaaaaaaaatttgtagagatggggtctttctgtgttgcccagactggtctcaaactcctgggctcaagtgatcctcccttctcagcctcccaaagtgctgggattacaggtgtgagccactgtgtctggccctgaatcatttattttattttgagccaggttctggctctgttgcccaggctggagtgcagtggcatgatcacggctcactgtagcctcaacctcccaggctcatgcgatcctcccaccttagcctcccaagtaactgggaccacaggcacacaccaccgtgcccagctaatttttattttttattttttattttttttgagatggagtttcgctcttgttgcccaggctggagtgcaattgtgcgatctcggcccactgcaacctccgccttccaggttcaagtgattctcctgcctcagcctctggagtagctgggattacaggcatgcaccaccacgcccgcctaattttgtatttttagtagagacggggtttctccatg[132 bp omitted]taggtagcccagggtcttcacctcctggattcaagtgatcctcctgcttcagtctcctgaagtgttgggattacatgtaacagtcacttcattcaccctgaatcatttatgtaggggacaaaaatcaccgtctctccaaggacagaacttcttttttgttttgttttgttttgttttgttgagatggagtcttgttctgtcacccaggctggagtgcagtggcgcgatctctgctcactgcaacttctgcctcccgggttccagccattctcctgcctcagcctccccagtagctgggattacaggcgcgcaccaccatgcccagctaagttttgtatttttagtagagaaggagtttcactggccgagcgtggtggctcacacctgtaatcccagctactagggaggctgaggcaggagaattgcttgaacctggtagacggaggttgcagtgagccgagatcgcgccattgcactccagcctgggcaacaagagcgaaactccgtccaccccagccaaaaaaagaagtggttttgcca[139 bp omitted]cccaaagtgctgggattataggcgtgagccacggcgcctggccgcaaaaatggaacttctgcatcacaggtgactaacggtgccaggcacacagtaggtgttcaataaatcactttggactaaaagaacacagaggccaaggggaagtgaagaaacgactcacaggtcagttttattgggtgcctagtgcaggggtcagtacactacggccctcggatcagctctggccctctgcctgtttttgtaaataaagttttattgggtgcctagtgcaggggtcagtacactacggccctgggataagctctggcccactgcctgtttttgtaaataaagttttatgggcacagagccatgcccatggttttacatattgtctctggctactttcactctgcgatggcagagcagagtcattgccgcagagactgtggcctgcaatgctgaaaatatttactctctggccctttacagaaaaagtttgccaaaccctgagctagtgtgtgctgggccctgtgccaagccctttgtgtgtgctcactcagttaaccctcccacagccttaagggtgggggcaggggggtgggggggaataaggctccgagaggttgagaaacagacccagggtcacacagcttggagatgggtgagctgggaatcagacagacccgggacccctgatattctttaggatcttagctttgttaacctttgctaatttatcttattgtcttaaatgctaaaatgaatacacattcattgtaaaaagggaggaataaagaaaaggtgttgacggccttcttcagcctggggtacatcctgccgtatctttctccacagctcatccggggctactttcctttaaatctacagccattcagcaaacatcggcagaggagaaccgttttataagaaaactaagaagtttggaagaatctttccttcctgcccaccctggacccccatgagtaggtgtgctggggctggtctgcagtgttctcacgggaaaccaggaagctgggcccaaggcctacatgttggggaagacaggtcctgcctgtctcctgctgtggctccccagtgctctgaggacaaagcctgagctctccctgattctccaccgtccctctcactcactctggtcgtctggtcgctgggcctttagtgagtgtgccatgggggccctggggccgattaaattccagccccggggaccaggctcagctcccagccagggcacagacagatcagcacctgcggttgtctccaccccaacccccggcctttgcaggcacagcgccctccaccagatactccggcaaaggaggcctggggaccctgcgagcggggccgggggtgcagggagctgtcagctcctcgcagcggcctccccaggacccccctatcccctcgctcgccctgaaatgtgtgtccctctcggcgtctgggctctcgagaaaggcctttgcttgtctgacttcgcgagggtcccggctctggcccaggagctggggaggggcgggacttggtgacagccgggtcccagcaccgcgcccagacctaggcccttctcaggggtgccccggggcggggcgcgcggggcggggggcggcggcggcgcagccggcaggaggcgcagcgcccgctcgcagcgcggggaggtgggaggggagcggggcggggagcggggcgggcgggagggagaggggagcgcgccggagacgcgcgcgcccagcccaccccccgcgcccgccgccgcccggacaataaacagcagctttgcgcggggcgatgcccgagccggtgccgccgcccccgcgccgcgcagccccggccgccaggccttagcccgccccggcccccgccaggccgcgtccccctcccctcccctcccccgcgcgccacccgcgcccgcccccgcccggcaccgcggacccacccggacctcggcggggagatggagtgagtaggcgcgctcgggccgcggggctgggggcccggagctccgggagccggggaggggggaggccccctctctcgcgccccattgggggcgtcgctgcccccgcgaggagcaggaggcggcgcggggctgctggggccgcagcgcagccgggaagagactcgggctgggccgcgcctgccgggaggcctccccgctcccggaccccggctgcccacccaccggcgcgtggggacccgggcagcggcggctcgggccagtccaggacgcggggagggggaggctcgcgtctccgcccgcgccccgcccgcgtctccagggcgagcctcggctctcggccacctgtgggtggccccggggagatggagcgacccctccccagattgcaccggtccggcctcgcgctcacgcacccttcccccgccccagtctgagcgcacggctcctggcgccctggacgcgcgcgcgggccggtgccccccacccccgcccttcccaagggcctccaggggtgtcctgagccccccgccactgcgcaggtcccgagttaccgctggagggagaggggctgccctcggcttcccgggtctctggggtgtgtgagaagggagaggaaccggcgttttccagcggggcgcctgggtgggataccctctcggggaagtgtctcggagctggggctccactggtgtagctacaggagtgggctggccctgggctgggatccctggacccccgcatggctgcgcctgtgtgtgtggggggggggtggccagtggaggcaccgagcgagggcgcgtggtcatttcggacaccggtcccctcctcccggtgctcgggtgcccctctgcccctcactcccacaggtgggcactgcacgggcaggggtcaggaggctcctcctggggtcacccacctgcccacttcaggacaggggagccagctgccctgctgaggcccgggtccccaccccagcccgaggaccgaagaccggatctggaggccgcctgtggccccctgcccttcccactgggcgtgttttctaagccgccaactttccccggggattcacccgtgacccgccacgcccgcggctgggtgggggccgctgcctccctccctccctgggaaagcgagacacccagtgtcctctgcttttgaaaacccagacaaaggcctgacccctctccccgtcaccccgccccgggagctcagccaggggctcaggggagccagggcccagacttgcctgctccacacccccaccccccagccttgtttatctgccctgctcgccaggccccggaggagcctctgggcctctgacagccaggcctgggcagggtgtggctgtggggagggggctgcctaggaggacgacggagatctccctcccagaggaggggtgtcagcgaacactccgggtcgggcccattgtttccttcctgccaccccttcctttcccacgggggatactgaggcccagagaggagctgctgccccccccccaccccccctccatcacacagcacctggggccggggggcctcggtgcctcctgctctgctccacggtttctccgtcctgggtcagagggtggcccacaggtcccccattgggtcatcattgcttttggggatgcagacatgggacaggcacccagtgttaaccggctgctgtgagccgccattcgaggacgactctctccccggttcccgggctgacaatgggtggggacaggcccatctggtgccgcccggccttggacacctgccccctcgttcttctccccggcgggcttcaggcacgaaggccccgtccgctagaacgtgatcgcttgcctcctcccgtttccacagattttccagtcgaagacacgggagctggctgtggtttgtggtggtgcccgtctcgctggaaagtttcacaaatgaatttaagaatttaaagaattttaaatgtcattcaagaacaggttattttttgttaatgtgaggatttaaggagaactagcgggttgctaaccacagggccgatgctgccaaggtgaggagaacgtccaggaaggagctggggagaatctctgcttcggagagaatctctgtgctctgggagggtttgtgtggcccctgcgtgacacatggtctggctggtaaaataaagatattttggcctggagcagccattctccagcacccacagccctgtcctgggtacaggcaaggctcaaacccccgggatagggaggagaacagacttgggcctggacagatggtcaagaccggcccagactcctccctgctcgcagacctggaaattttcaataggaaagtctccgttgggtgctaactgggtccttaacgctccttcacacttgctaatccccctttttaatgagaggcagagcctgttaaaaggcaacagtacctagtgataattgaatttaataacaagcttttacttccgttgtatctgtttcttcctccatgtttccgctgtcttgtttgtggcggtggcttctggtttgcccagtgttgatcacaatataatgtttctttctaaaacaaggcgatttgatttacactggagtggttttgaaggcaaggaatagacagatactgtccaggaggtggcggaacatgggaaggtggtttctttcttttttccatgttgcccaggccagtctcgaactcctgggctcaagcgacttccctgcctcagcctcccaagtagctgggacgacagcattgcatgggaaggtggtttgagaagtgcaggcgtaatttattcactcggcaaccattaagtgggtacctgccttttccacggccctgttttgagtgctctgtatgtgtgtgaattcctctgatgcttttttttttcttttggagacagagtatctctctgttgtccacactggagtgcagtgctgcgatctccactcactgcaacctccgcctcccgggttcaagcaattctcctacctcagcctcctgagtagctatgactacaggtgcccgccaccacgcccggctaatttttgtatttttagtagcgacagggtttcaccaggttgcccaggctggtcttgaactcctgacctcaggtgatccgcctgcctcggcctccccaaagtgttgggatgaaaggcgtgagccacgtgcctggctgacacttgccttttccatggccctgttccgaatgctttatgtgtgagaactcccttgacccttgatccttctttttttttttgagacagagtcttgctccatcacccaggcagtgcagtggtgtgatcccggctcactgcaacctctgcctcctgggttcaagcggttctcctgcctcagcctcccgagtagctgggactgcaggcgcccaccatcacgcccggctaattttttgtgtttttggtagagacagggtttcacagtgttagccaggatggtctcaatctcctgaccttgtgatccacctgccttggcctcccaaagtgctgggattacaggtgtgagccgccatgcctggtttttttttattggagacagagtctctctctgtcacccagactggagtgcagtggcgcgatctcggctcactgcaacctctgcctcctgggttcaagcgattctcctgcctcagcctcccgagtagctgggattacaggtgcctgccaccacgcccagctaatttttgtatttttagtagagacaaggtttcgccatgttgggcaggctggtctcaaactcctgacctcaggtgatccgcccagctgggcctcccaaaatgctggcattacaggtgtgaggcaccgtgcacggcccactcccttgatccttacagaagccctgcgagagagggaaactgaggtacagggtggtccagtggcacatgtaaggacacacagctgcagaggcatgggtggggggtttgctgctgggtgggccgagcatgctctctctaagccgccggggacaggggagggtttttggtacctgtgtctgggggttgtggtcttgtggggcgtggtggtctggatatcagacatcctggtgtcggctttcaatcctggtgtgtttattgagaaacacagacggtggccttgtcggtggtcttggctcctggggcatctgccctgcctctgtgcccatccacgccgttctgtgatttgggagaggagtgtggagagggggtcctgactccccgtcacaccttagcatgtcagtctcctccgggcctcactgttctcatctggcgagtggggatgtgactgccatcattaggggagataggggtagaggaagggcaggtgctttatgggcctggaccctctgagcaccacccagtgggggcatctctgcctctgcccattagccaggttcatccttaagggcctcagattttgaccctaggaaattggcttatgttctttttgtttgtttgtttgagacacagtctcgctgtcacccaggctggagcacagcggtgtgatctcggcttatagcaacctctgcctcctgggttcacgcgattctcatgcctcagcctcccaagccgctgggactacaggcatgcgccactgcgcctggctaattttttgtatatttttagtagagacggggtttcaccatgttggccaggctggtctcgaactcctggcctcaagtgatccgcctgcctcagcttcccaaagtgctgggattaca[135 bp omitted]tcctgggttcaagccattcccctgtctcagcctcccgagtagctgggactacaggtacccgccaccacacccagctaatttttttgtattttcagtagagatgcggttt[144 bp omitted]ccaggctggtcttgaacttctggcctaaagtgatccgcccacctcggcttcccaaagtgctgggattacacgcatgagccaccgcgcccagcctacgttctttttttctttcttttttttttttttttttcagatggagtctctctctgtcgcccaggctggagtgcagtggcgagatctcggctcactgcaagctctgcctcccaggttcatgccattctcctgcctcagcctcccgagtagctgggactacaggcgcccgccaccacg[183 bp omitted]agtgcagaggtgtgatcatagctcactgcagcctccacgccccgggctcacgggatcctccacccagcctcttgagtagctgggactacaggtgccaccaccacaccctgctaattattatgttttgttttgtttttgtagagacggggtctccctgtgttgcccaggccggtctcaaactcctgggctcaagcatcctcccacctcagcctcccaaagcgctgggagtacacacatgtgagccactgcacccagcctgatgttctttaaaagcatcatatgggccgggtgcagtggcttatgcctgtaatcccagttctttggaaggccgaggcaggaggatcacctcaggtcaggagttcgagaccagcctggccaacatagtgaaaccccatctctactaaaaatacaaaaattagccgggcgggcgtggtggcgggtgcctataatcccagctactcgggaggctgaggcaggagaatcgcttgaacctgggaggcggagctttcagtgagccgagattgcaccactgcactccagcctgggtgacagacagagcgagactccgtctcaaaaaaaaaaagcattatatcacctttttctgagtgtgggcccctgtttcctctcatcctttcttgatctaggaaacctgtcatttgtttattgaacaaataaatgctccctcctcaccatcctcgtgctgtgcgggatcagcagggtctggaaagctatgcagcatcttctctgaggtgtgagaaaggcttcctcatccagtccatcatgaaccttttctgagaaggatgtttcagggttcatccaggcaggcagaaggatgcaccttgtggaaggactggcatgtgcaaagggctagaggtgggaaagcattggaagaagagaatgctctttggtgtttgttcctgctaggccttgagtgccaggatggggagtcatggatagtgtgtgagcaggggaggagcagtggctgacctggtcatcaaaaaaggcgctggcagctgaggagtgagcccagggaggagcaagtcatggccaagccttgattgtggctgcaggggcagcatgcagagaaatggcagagccagagggggcaggaccccacgtctaggagggcaaacacaggattccagaactgcgtgtggtcagtgatgcccacagggacggggctccctggctggggagaagtagcctggtccctggatacatgagggggtggagggcgtcctctaggaggatggctgcgtggacgtcttggtgtctgaggagtgtaaaatcaggccagagtggctgtctcccgccccagggtttcaagcagaaattcagggacagtcagagccagtcaccaggacagagcctggactgggtgggaagaggg[146 bp omitted]acccccgtctctaccaaaaatacaaaaattagccaggcatggtggcaggtgcctgtaatcccagctactcgggaggctgaggcaggagaatcgcttgaacccaggaggaggttgcagtgagccgagattgcgccactgccctccagcctgggtgacagagcgagactctttctctcaaaaaaaaaaaaaaagaaagtttagattaggaccagagtgaggccagctgagtgggaggcgctgcatggtcaacagactggtggtgggacagggccaggcctgggagcccctcctgggtgggcagaggctgtgggcaatggaggcagagatgcgggaccctgaaggccggggagggacagaggcccagggttcttcagtaacccctgtcagggagcgagaagctgatgtcctcatcagtttgtattcaaacgcttccagccatggaaagtctcagggcagggccagcaggggtttcagcactccatgggggttgggaaggaccccagcccctggcctggctcttgttgagaaggctggcattcccattacacatgcacgtatacacacacgtacacaggtatgtatacacacgtctgtatgtatatcattcttaacagcttcattaaaatacatttcacacgctacacagtctggctgcttaaagtgtacagctcaggcgtttttagtacactgacagggtgtactttttttttttttgagacagagtctctctgtcacataggctggagtgcagtgacgtaatcccggctcactgcaacctccgcctcccgggttcaagtggttctcctgcctcagcctcctgagcagcggagattacaggcacgtgccaccacgcccggctaatttttgtgtttttagtagagacggggtttcaccatattgaccaggatggtctcaatctcttgaccttgtgatccacctgccttggcctcccaaagtgctgggattacaggtgtgagccaccgcgcccagcagagttgtgtatctttcaccacaattgtagaacattttcatcacccccaaaacaagccctgtccccattaggcatcccctcccgtccccctccccccagccctcggggagccagtccccttcctgtctctggatcggcaggtcctggacatttcgtagacatgggatcacacgctgcgtggccttctgtgtctggcgtctctcactgagcgtgatgtcctcaaggtgcatccgcgccgtggcctgggtcagagcctcgctcctgttcacggctgagtcatgtcccagtgcgtggacggccacattgcgtttacccacacatctgtggatggacacccgggttggtttatctgtgaatctgtagttaccccccgagatggttggagcttgtgctctgttcacactgaggagtccgggtcctactttacataagtgtaagtcgtgacagtgagtttctttaaaaagaagaggcagtgatcagatgacaggtggccctgggagtggcgggagtgtgagaagagggggccgggattggggggacctctgggtgggggcttcctctgaagatggaaagaccctaatcgactccctggggcagcaagcatttattgagcacctgctgtatgcctggtgccaggga[131 bp omitted]catggtgaaaccccgtctctactaaaaatacgaaaattagccgggcgtggtggcatgtgcctgtaatcccagctactcaggaggctgaggcaggagaatcacttgaacccaggaggcggaggttgcagcgagccgagatcgcgccaccgcactccagcctgggcaacagagggagactccatctcaaaaaaaaagaaaagaaaaagataagtaaagtgatccgggtggtgacagctgcaggggtgcctggggctgaaaattaggacagaagaggcctaaatgaggaggtgacgtctgcagaaaggccttgggcctgaggcccggggaggtctgggtgaccgtgcaccaggcagcaatgcagccagcacaatggccctgcagtgggagctctgtgggacgtctcaggagtgtggctggagtgcagtcgcgtggggagggaccatggggcctctgcagcagggtttgccctgagaccctgctgaaagccagggaaggccccgttcacgcctcactgccccgtcttcccctgagggcccgggcagggtcccttcccaccccaggttaataggcaacaggtttgcttctctgcatctgtggcctgctttgacctccgtcttctcctctcccccggggtgatgcctctctgccgtaacccgtttagggttctcggtgccccagagactgggatggccctgggggcctccgtgctgcatcctgggagggctgggaggaggttccttcctggaaggctgcctggaggaggtggctgtgcttgagctgatcttggcggtggagaagggaaaggggaagctgggagctgatgaagggtgaggggctgacattggggcttggactccggggcttggagcagggcagggcggtggaggaagcagggccgggggtgccagcgctcaggggagacacaggctctgaggaccgaggatcaccgggactgggaagcagctggggtccagactccccgaactccatcccctgctgcccccgcaccccacacctcgcagccccgcgtgactcccccaccccccacaatggccaaggtcaccgtcagctctttcctttcaattagcagcaggaatgttcccggcgctgggctcggcgcctgcccgggcagggaccccctcgttctggctggagctgcccgggcgtgggttctggaaggacgagtgcgacgcccccatcccacacacgcccctcccgcctcggacagggcccgccctgctcgctgggtgaccttggccgttgcgtaacctctctgggcccttccaacaccaacgccccgcaccgcggaggcctctgcggggctcccgtcgggtttgggcctcatgaactcatctcctggagcaggactatctcacgcgctccagacgacgccctcgccgggccccgagccgcccacaccgccacacgccgtaaaaagcatcgcggggacgggaggcctgtgcgcgccggggtgggcgtcgggcggggggcgtggcgctccaggggctctgcgcggctgccgggagccagggaggctcggagacccagcacctgccccgggacccccagcacctgccctgggacccccagcagcaccaggaccgccgccgccctgagcttttccacgcctttgcccgggactcagctcctccgcccagcatgtaagaccttttgtgatccgacctccgcttccttccgtgacccctgcgccggggtcctggtcccagcctcgccgatcacacgggaatgagactcccccgcgcctggcgggccccgcccgcaggaggatgaacgccgggagaaggccgccctgcccggcctcagtttccccgtcggtgaaatggggctgacccggccgcaggagggagcgagcgctgggggaggcgttctcggtttgtggccgttttgatccgtgcgtcgtggtcatatttcgcttaatttttccaatctgtgacgtggagcgttctgtcggcctgaccttggctacccggcgtcgggggcgggtccacacccctcccggatggaagccccttcctgggcgggcgccccccggacgcccagacggggacccccctcccctcccccagccgcagcgcgggggagaaattcccgacccctcccgcccgtctaggccgccccaggcccgaagcctcggccccccccaatccccccaagcacaggccgggggcgggagatgctgcgccggccccacccccgcgcgccgggcctcggcgttgccatggggacggcgcggttgccacggcgaccgcctcccgcgggcccctccatccatcaccggggcggcggcgcccgggtctggggaggggcgaggggggcgcatcctgcgtgtcctggggaaaggcgagggggcgtccaggcccggggaggggcgaggggggcgccgggtctggggaggggcgaggggggcgccgggtctggggaggggcaaggggggcgcatcctgcgtgtcctggggaaaggcgagggggcgcccgggcctggggagaggtgaggggggcgccgggtctggggaggggcgagaggggcgcccgggcctggggagagtgaagggggcgccgggtctggggaggggcgaggggggcgccgggtctggggaggggcgaggggggcgcccgtgactgcgggggccaggggggcgcgtcctggggaggggcctgcgccctggggctgcttcccgcgcgttccctgcccgcccgcctgacattcccccgccctggccggccgggcagggacaggctgccccagacactaccgccttgtctccagcctgggaggcggccacacagccacactctgtccccgggtccggtctgagcggccacctgcctgccgggtggggacctgggcagtcggcgaccagcctgatcctggggcccaggagttccgccgttttgtggacctcccgccccagctctgctccctccggggtggccccgagcccacttagagctggaaaccaggactgtggggtggcccggggctgggcggttgttgttccaatctggctgtgcccagggccacgctgtgccctccctggacgtggcttccagccatgggaagaaggtgccgggcagggggaaccgtgtgtgagaggccctggggtaggaggcttggtgcatagccagggggccctgcaggagtagaccaacgggggaagtgaaggggccgacctgagggttcctctaagggctgatgggagccagggagcctctagagctggagagggacagggtctgattaattattattattattattgttattttgagatagggtttcactctgtcccccaggctagagtgcggtggcacgatctcggctcactgcaacctccacctcccgggttcaagtgatcctcctgcctcagcctcccgagtagctgggattacaggcgcctggcaccacccccagctaatttttgtatttttagtagagactgggttttgccttgttggccaggatggtctcaaactcctaacctcaagtgacctgcccaccttggcctcccgaagtgctaggattacaggcatgagccaccgtgcctggccttctttttttaattttaaaaaaattttttgtttgtttgttttgttttttgagacagagtttctctcttgttgcccaggctggagtgcaatggtatgatctcggctcaccgtgacttctgcctcccaggttcaagtgattctcctgcctcagcctcctgagtagctgggattacaggcatgtgccaccatgcccggctaatttttgtatttttagtagagatggggtttctccatgttagtcaggctggtctcaaactcctgacctcaggtgatccacccgccttggcctcccaaagtgctgggattccaggcgtgagccactgcacc[139 bp omitted]cctcagcctcccgagtagctgggactacaggcacccgccac[183 bp omitted]cctaggctggagacagtggcacaatcacggctcgacccagcctcaacctcctggattcaagtgatcctcccacctcagcctcccaagtagctgggaccacagggacataccaccacacctggctttttatttatttagttagttagttatttttgtagagacaggctcttgctatgttgcccaggctggtctcgaactcctgggctcaagcgatccactggccttcacctcccaaaatgctggaattacaggcttgagccaccacacctggcctagggtctgattctctttttgagaagctgcctctggctggcgggtggagagggagctgtgagggggcagggagttggcagggaacactagaggcctgggctagggtggggaacttggggtaggcaggaagcgagggcccgggcctcaagggaacgcacagtggatggttcactgcctgcatcacccgttgctggggctgaccgagaactccagctgagctggctattcaggaagggcccccaagccagaaagctggatcaagcctttcctgaaccccacccggtgaaggcagctgaacccagcctccctgaggagggagaagggaaagccacagagggcgcagctggtgttcccgggcccctgggaggcaccgggaagggtaggtgtcacctgccaggaagggaggagccggtggggtcacctctggggcatgggagctggacaacttcacaggcctcagcagggccaggaaaccaaacccgagtggggtgggcaggcggggcgcctcgggctccagggaggtcttgacccggagcagcctcccaggcggggctgggggtgagccagtgcactgtgcagtttcattttctctgctgaactgggggaggggatgggggcacaagggggacgtcataggaggccttagagctgcaggcatctgtgcctccgtgtttgcgtggatggggaaactgaggcccagagaggcacgagggctctttggaggcagggctggctctgggccctgacaccaggctgagagggctgggggtggcagcagacacgaagggcaggctgtaatttcagtctctgggaagataagatgttgggggtcgggggaacctgtctcccacccctcacccctggttcccgccaggccctgcccgtcagcctgggcctccccctgttgatgccgcccagagcttgggacacccaccgccaacccctaccgtcctctccctgcctcgctgcaacagccttggaagcctgagggtcgctgggaaggtcaaggccaagctcagccccagtctagggctcggtgctccttgcgtttttctttttgttgttttgttttgttttgtttttgacggagtctcgctttgttgccctggctggagtgcagcgcgtgatctctgctcactgcaacctccgcctcctgggttcaatcaattctcctgcctcagctcctcaagtagctggttttacaggtgcctgccatcacgctcggctaatttttgtattttttggtagagacggggttttaccgtctctgttggccaggctggtctcgaacttccgacctcaggtaatccgctcgcatcggcctcccagagcgctgggattacaggcgtgagccaccgcgcccggcctgctttttgcattttactaagcacctactacgtgcagctttctgagggcccacagaccagggaggggaggggagggtttgggtggcaaagctcttcttctagcaggtgggaggggaagcgagaaagcagtggggtgggggtgccctgaactccgtgtgaaccacggggctgcagacagatgaggagaggggctctgcaccagcttctggagctgcagggcgaggttgctgtggggaggtcagagaaccacagaattcctcggttctttcctgggcgagtgagcgtgtggtgggtgcctggtgggggtggcgagggcttcggtttctggacctccttcccacaccacaaagggccctgtatctttgaagcctgaagcccggtcccttcaggcgtatccggcaacagtggtattcattcattcatttattgtttgtttgtttgtttgaggtggagtcttgctctgttgcccaggctggagtgcagtggcgcgatctcggctcatgcaacctctgcctcctgggttcaagccattctcctgtctcggcctccaagtagctgggattacaggtgccgaccaccacgcctggctaatttttgtatttttagtagagacgggggtttcaccatgttgggcaggctggtctagaactcctgacctcaggtgatcctcccacctcagcctcccaaagtgctgggattacaagcgtgagccactgcgcccggccattcattcatttttgagacagagcctcatgctgctgcccaggctggagtagggtggtggggtcatggctcactgccccctggacctcccaggctcaagcagtcctcccaccttagcctcccgagtagctgggactacaggcgcacaccaccacaccttgataatattttttatttttatttttggtagagatggggtcttactagattgcctaggctggtctcgaactcctgggctggagtaatcctcccacctcggcctcccaaagtgctaaaattacaggcgtgagcagctgtggttttgcttttgttttgttttgcgacagggtctcactctgttgcccacgctggagggcagtggcgcgatctcggctcactgcagcctcgacctcccgggttcaagtgattctcccacctcagccttctgagtagttgggagcaattctcgtgcctcagcctccacgcccagctaatttttgtatttcttggtggagacaaggttttgccatgttggccaggctggtctcgaactcctgacctcaagtgatccgcctgcctcagctgccccctgatatttgttaagcgcctaccacataccagccctgggaggtgaggc[140 bp omitted]atggtgaaacccctgtctctactaaaagatacaaaaattagccgggcgtggtggcaggcacctgtcatcccagctactcaggaagctgaggcaggagaatcgcttgaacccaggaggcggaggctgcagtgagctgagatcctgccactgcactccagcctgggagacagcaagactccatctgaaaaaacaaacaaaaccacaatgattggataagagcgagtctggggttgaatccggacttggatcctttgctgtgcgtccttgggaggctcgtctccctgtctgggcttttgcaagcccaggcttgggaggtggggctggtgggtctttcatcctctgtttgcccctcctggggctgcagagtaggtcttggtgggcaggagggtgcagagaggactgtcctgatctgtcttatggtctgggccaggaggtgatacacttccttcttcccgaaacacccttctctggcctttgatgcctggtgaactcctatgtatccttggtggccctgcctcaatgtccccttctccccaaacccttcctggtcgctaggcagagcctcgtcccctcctgtcctggcttccttggccgctgagggggcagggagggccccactttacagaaggggaaactggggttcagagatgaaatcccttgccctggttacccctaggggaagaggcagagctgggatttgaaccgcgtctgacggacagcagggctcagtgaaccagagcttgaccttatctccctcccgcagggtcctggcggcagagaccacgtcccagcaggagcggctgcaggccatcgcagtgagtttccgccgccccgcagacggtgtggtcagggtggggaagtggggggacctggggtctcgggccctggacctgtcctaggacctggaaccagggcatggtgggtggtgagttatttgcttgggaaacttggatcctgctgacccgcagagaatggaagtggagaccccctgagtcggcagctcctggacccccggcctcgctctgcctgatgggtcggtggggaaactgaggctggcattccctggaaccctgccctcgtcctgcaggaaaataaactttggtgatgggagcacagatgtgctttggtgccatcttggtggcctctggcccaagaaggccctcttggtgtccgcagacccctctctgtgacccgaccctcctgtgacgtggcccgattcctgggttcaagtgactctcctgcctcagcctctcgagtagctgggattatgagtgaccgccacgacgctgggctaattgttgtatttttagtagagatggggtttcaccat[139 bp omitted]ggctggagtacagtggtgcgatccgctgtcacctggaagccagtgggccacgaggatccccggacagaggaagcaggatcgggctgggcagagccttgtgtgggggtgggggggtctccgggacccccacgcccatccctgaccccacccggccctccccacaggagaagcggaagcggcaggcggagatcgagaacaagcgccggcagctggaggacgagcggaggcagctgcagcacctgaaggtacgagcggggcagggacccagggtcagggagtgcaggcggctgtgaggcggaggccccggactcctgcccaaccctgaccctgaccccaatcccaacctgaccctgaccctgcctccagccctgaccctgaccccgaccctgaccccgaccccgaccccgaccctgaccccaacctgaccccgaccctgaccccaacctgaccctgaccccgaccctgaccctgatctcagtcctgactctgaccctgacctgaccccaacctcaatcctgaccctgaccttgactctgacccagaccctgacccccaacctcgattgtgattctgacctcagcactgatcccaaccataaccctgaccccaaccttggtcctgcctcaaccccgaccctgatcctgaccctgacctcagtcttaagtcttaaccctggccctggtcctgcccacgactctgacctggatccctgctgctcagtccaaggcactgcgggagcgctggctgctggaggggacgccgtcctcggcctcagagggggatgaggacctgaggaggcagatgcaggacgacgagcagaagacacggctgctggaggactcggtgtccaggtgggggctgcagcgtgggtgccaccgggctgggtggggcctcgggggccgctggctcccgggagggtgtgggctgggaagagtcgtcagtgtgctttgagggagatgcgtggaccgggcaggccaggacccaacatgctttgagggggacgcaggacgggacagatcaggttggggcatccacctgggtctggggcagcttgctgggggcagaggctggctgcgtggcctcaggcagggagatacccctttcccttcccaccgccctcgtttgagccagcgagggacgtggcgtcgagctcctgggtccctggagctggccagcgggggacgtgacgtcgagctcgtgggtccctggagctgggtgttgccggcattggcctccctgggggcttcctggcgccagcccagctggcgggcaagcgctcccatggttcgaacgggatggatgcagagcagctgggcccgcaggaagctcgggcgggggcaggaaggggacaggatggggaaagtggcaatccctgtgggggctgggaccaaaggcctggagtttccggcgggcgggaggcccaggctgtgctcgggggcagcagggtcagggtggagggaagtgacgaccaagattccaaacgtctgccctggccagggaaggtgcccagaggcgggaggccggccggatcacacggacctcgcaggcccttcccagacgctgggttctgaccccgtgggggcccctccctgcccagttctgcccatttgctttgaagaaagcacgttgggggtgttcgggatggacttccctcctgggcagggcgtgtaaaggcatggacaggccgggtgcggtggttcacacccctgatcccagcactttgggaagccgaggcaggaggatcacttgagatcagaggttcgagaccaacctgaccaacatcgtgaaaccccatctttactaaaaatacaaaaattagcctggtgtggtggtgcccagcctgtaatcccagctactccggaggctgaggcagaagaaggccaggcg[208 bp omitted]gcttgcagtgagccaagatctcaccgctgcactctggcctgggcaacagagtgagactgggtctcaaaaaataaataaataaataaaaataaaggcatggacatgctgggcgtgggtggggctcacacctgtaatgccagcactttgggaggccgaggcaggaggatcacctgaggtcagagatttgagaccagcctggccaagatggcgaaacccagtctctactaaaaatgcaaaaattaggtggattagtggcgggcgcctgtaatcccagctactggggaggctgaggcaggagaattgcttgaacccaggaggcggaggtttcagtgagccgagatcaagccactgcactccagcctgggggacagagcgagaatctgtctaaaaaaggaaggtatggacagggtggggcagttctggtgggtttggggccttggaatgagccgagtgttacccactccctgggcctcagtttcctcacctgtgaaccagggaggc[131 bp omitted]ttctcctgcctcagccttctgagtagctgggattacaggtgcccgccacgcctggctaattttgcatttttagtagagacggggtttcaccatgttggttaggctggtctcgaactcccaacctcagctgatccgcccgcctctgccttccaaagtgctgggattacaggtgtgagccactgcgcctggccccactgtgcatcttaattccagcaaacattaagcaccagctgtgtccctgggctggacgggatgttcagaccgaggtggggctgagacgggcctggccctgtctgcagagaggtggatggtcagacacctgggcgaaggcagtgggagttactggccgtgggggctgggcacactggtgttcttttcacgcggccctagtgggcacaggctcaggcccctcgatggagggtgaagacctggcttgaggcctagtttgctttcagaggcttcagcttcacccctccccagggcagcctgcttctcaggtgctgaaactgagctgctctgggtctccactacccaccttctgcctgctcaggggctctgcccaggcacctcctgcaggaagccctccaggctgactgtgggctcccagacacctcctgcaggaagccctccaggcggctgtgggctggacccctcttctggttggaggggacacaagtctggctctgtgtccaacctgtcagcctgggcccaccttgttagacttacgcactcagccctcgtctgtcctgtcctcaggctgaggctgagctgccgtgaatgtcgcccgcccttgccagaccccggggctgggatttcatatcccggttttgttttcctggatctgcttgtcccgttatctcttctaatacttggaaagtgacatggtttttccagtttccctggtgagataaagtttcctgttaaaatgtgcaaatttgagcgggaaaggagagttcatttgatacagacagtgacataaacagcgcaggccaggggtcaggggacacagggagtcagccctggtttggatcccgcctctgctacctgctggccatgtggcttttgcactccgtgcctcagtttcccccatcatgaaagagcacgatgcctcttggggctgcctgggagccttaaattcagagagctaggccgagtgcggtgggtcacgcctggaatcccagcactttgggaggatgaggcgggcagatcacctgaggtcgggagttcaagaccagcctggccaacatggtgaaaccctgtctctgctaaaaatacaaaaaattagctgggtgtggtggtgcacgcctgtaatcccagctactcgagaccctgaggcaggaggatcacttgaacccgggaggtggaggttgcagcgagccaagatcacgccattgcactccagcctgggcaacaagagcgagaatctgtctcaaaaaaaagacactggggagctgtcgtacagaaggtgcccagagccccaccggggatgcaggagtcaccctcacaggcacaccctctccccaggttggagaaggaaattgaggtgctggagcgtggagactccgccccagccactgccaaggagaacgcggcggccccgagcccagtccgggccccagccccgagtccagccaaggaggagcgcaagacagaggtggtgatgaattcacagcaggtaagggggtgactggggggagcggatccccaggcacccactcccgctggccccagagcgaggccccagcccttccatgtcagcgtagctgaggggacaggcacagactagagccaggcacttgatttccagctcaccggagccacttcccagctgtgtgagccgggacacgtggtttcgccttgctgggcctcggtttccccatctgtaagatgggggagtaatcagagcagccaccgctgggggcatcagaaggactcagggaagcaggagacccacctgggggcatcagaagggctcagggaagcaggagacccacctgggggcatcagaagggctcagggaagcaggagacccgcctgggggcgtcagaagggctcagggagcagcaggagacccggtgctggtgggtgtggtcatagtgtttttttgcttttgttgttttttgagactcgttctgttgcccaggctggagtgtagtggtacagtctgcaacctccacctcccaggttcaagcaattctcctgcctcagcctcccaagtagctgggactacaggcgcctgccaccatacccggctaatttttttgtatttttagtagagatgaggtttccccatgttggccaggctggtcccaaactcctgacctcaggtgatccacccaacctcggcctcccaaattgctgggattacacgcatgagtcaccttacttggcctggttattttgtttctgtgtttgtttttgacacagggtctcactctgtcacccaggccagccagagtgcagtggcacaatcacagctcactgcagcctcgacttccccagctccagcgatcctcctgcctccgcctcccgagtagctgggaccacaggcacgcaccaccacgcccggctaatttctgtatttttggtagaaacggggtctctgctgtccaggctggggttttcatggtttctatcgatcacctgcatctgtttcatgtggccaaggctcctgaaagcccttcctgtgggaacagtatccccgtgtgatggaagtaaaaatcgcagcccacagaggcagagaggctggctcaaggccacacagctgagtggtccttagtggagtcggctgttaattctggcatctgccatctaagccagacgatgttaaaaccagacccttggccgggcttagtggctcacgcctgtaatcgcagcactttgggaggccgaggcaggcacatcatttgaggtcaggagttcaagaccagcctgaccaacatgataaaaccccatatctactaaaaatacaaaaattaaccagatgtcgtggccggcacctgtaatctcagctgctcgggaggctgaggctgagaatcacttgtacccagggggcagaggttgcagtgagctgagatcacgccactacactccagcctgggagacagagcaagattctttctaaaaaaaaaaacctggttctgggcacagtcctggacctcactgagctcacgtcaggtgggaagatggcgtgtattggggaccacccagggagggtggtcaggccgaagaggtgggaagcccagggcgctgtggaatccccaaggaagtgcctcattcgtgggagggctgggcaggcgacctggaggatgtgggtttcgtgggagggctgggcaggcgacctggaggacgtggggtggtttttttgtgtttttttttttgagacagagtttcactcttgttacccaggctggagtgcaatggcacgatttcagcaacctctacctcctgggttcaagtgattctcctgccttagcctcctaagtatctgggattgcaggcgcccgccaccacgcccagctaattttgtatttttagtagagacagggt[131 bp omitted]taggagttctccaggtgcttttccctgaaggttgtttgagcatggactagtgctgtcatgggagactcagcaatacacatgcacggcccctgccttcctgacgggcacacccagtgacgtgatgagggaagagtgcactgagggagcatcagacaccacagccctgagacaggagtgtgtcccagaaacagcaagaagaccagggatgccagggcacagttcagggagaggggcctgtgtgcagggtctgaccatgcagggcagaacgggttcagacaggcgacactagaccctgagcctcgcacagtggctcccaggaggccaagggaggaggatcgcttgagagcaggagtggacgagactggagggggcacggaggagccggctggattcagggtggcctgcgggagccgctgatgcgggggtatgtggggagggagggaagaaatgagatggagcggacgtggtggctcagcctgtaatcccggcactttgggaggccgaggtgggtggatcacctgaggtcaggggatcgaaaccagcctggccaacatggagaaaccccgtctctactaaaaatacaaaattagccaggtgcgatgacgcaggcctgtaaccccagctactggggaggctgaggcacgagaatcgcttgaacccaggaggcggaagttgcagtgagccaagattgccccattgcactccggcctgggcgacaagagcgaaactccatctcaataaaaagaaaaaagaaagatgacctctgtgtttctggccagagtcccaagaggataggatgagaagcgggtgcgtatgacgtcacccactgtgccatgccctccccaggctcctgaccccatggctccccttcctcttcccggggatgctgacgcccctgacccttctctcttctttcttgcagacgccggtgggcacgcccaaaggtaggacctctggaaggaactcgtggggcctcggcgcactctggtggccagagaggggatggcagggcggggagtgaagctacaaagttgctcggtgcctcacgcctgtgatcccagcactttgggaggccgaggcgggtagatctcctgaggtcaggagttcgagaccagcctgaccaacatggcgaaactcagtgtctactgaaaaaatgcaaagacaattagccgggtgtggtggctcatgcctgtaatcccagcactttgggaggctgaggcaggaggatcgatcgcttgagcccaggagttcaagagcatgctgggcaacacagggagaccctgtctctgccaaacataaaaaaattagccgccggccaggcccagtggctcagacctgtaaccccagcgctctgggaggctgag[132 bp omitted]gtgggaggatcacttgagcccaggaggttgagctgtgatcgcaccactgcaccccagcctgggcgacagagcgagaccctgtctgtaaactgcatttcacggaacgtgtccgcttctgtatcgatagcgggacagccaccagccgggattgacgctggcgtctgaagtgcttctggcctggtttgttgtgtgttaattattcataaggagagtgtcttcttgtcttactgtagaattaaaaattaatcattaaaaaaatccagacaggcctctcagggattttgtgaaaatcactgggctgaggatgaggaatgaactgtgaggctgcctgtgggattttctaggggttgcggtgggggtccaggtgcctgtgtctgtgcggggcctgtgtctgggggcccaggtgcctgtgtcctggtgtctgggtggggtctgtgtgtctgggggcccaggtgcctgtgtcctggtgtctgggtggggtctgtgtgtctgggggcccaggtgcctgtgtttgggtgtctcggtggggtctgtgtgtctgggggcccaggtgcttgtctggatgtctgggggcccacaggtgcctgtgtccgggtgtctgggtgggatctgtgtgtctgagggcccaggtgcctgtctggatgtctgggggcccaggttcctgtgtccgggtgtctggatgggatccgtgtgtctgagggcccaggtgcctgtctggatgtctgggggcccaggtgcctgtgtccgggtgtctgggtgggatctgtgtgtctgagggcccaggtgcctgtctgggtgtctgggggcccaggttcctgtgtctgggtgtctgggtgggatccgtgtgtctgagggcccaggtgcctgtctgggtgtctgggggcccaggtgcctgtgtccgggtgtctgggtgggatccgtgtgtctgagggcccaggtgcctgtctgggtgtctgggggcccaggttcctgtgtctgggtgtctgggtgggatccgtgtgtctgagggcccaggtgcctgtctgggtgtctgggggcccaggtgcctgtgtccgggtgtctgggtgggatctgtgtgtctgagggcccaggtgcctgtctgggtgtctgggggcccaggttcctgtgtctgggtggggtctgggtgtcaaaggcccaggtgcatgtgggagtccggatgcacttctgtgaaggggcgttgggctgtctggggggtccatgtgacctctcctctgaccctcatctctctctccgcttccacctcccgtgcagacaagcgagtctccaacacgcccctgaggacggttgacggctcccccatgatgaaggcaggtgggttggcccccaggctctgggccccagatccagccgctgtcagggaccaagtctcggtccggggggccgggtggggcgggggcgacaccgacctgctctccgcagcgtctgacggggccgtggttatgggggtggcagctggaccgaggccgaggctccgagcctggggtgggggccccctctgctttgttgccctggtcccacgccggcccacgcttccccgagaagacgggccccacgcatggcggctctaaccgacgcgacctcacggctttcattccaccctaatctcacggctccctcctggggcccgctgggggtggcgctcacgcctgaacatgctcgctgcaaatcttacctgctccagtcctcgggcagtaggactggctgccccgggagaaagtgggtgccccgtccctggaggcaaccaagccaggtccccagcaccgctgcgcttccgagaagcaggggaaggtgggggttgacgctgagtgccacacggtgctcaagtcaggctcgaacccctggtctgccgccttgaatttctccgcctgccagaggggtgggacctcagtacgccatcctggggcccggcacaggacaggagcccaataatgagaaatcgtcgcagtgggcaaaaccactgctatgtgagtgagctggaacagcacagaaagaaggcagagggccgggcgtggtggctcacacctgtaacccaccccagcactttgggaggccgaggcgggcagatcgcctgaggtcaggagttcgaaaccagcctggccaacatggcgaaaccccatctctactaaaatacaaaaattagccgggcatggtggtgcacgcctgtaatcccagctactcgggacgctgaggcaggagaatcgcttgaacctgggaggcggagtttgtagtgagccaaggtcgtgccactgcactccagcctgggcgacaagagcaagactccgtctcagaaaaggcagcaaggcagggaggtgaagaaggactctggggtggctgcccaggacgggacagggctggaaggaaggagagccacccggaggcccaggtctccagcacggtccagggtgggggttgccccaggatgcagcagacagaggcatttgtcagagcaggtggtgcctgtgggcctctgtgccagtgagaccagccctggcagacaccgaggcccaggtcccccgctgatccccgtggccactgactttgtgcagtgcacaacctgctcaacagtgtgggcagctctggactagctgtctggggtggagggctgaggctgtgcagagctatagagttgaaaaacagtcgtcccttcacccagaatgcctttcaagcgcctgctgcatgccaggcattgggggagagggtattctaatgagggccacaacctctactacggtagaaaagtgaggccaaggacgttgagctggaggaaggagaatttgaaccagagggctcaggggaggggagcgttcaacgtaagaggtgacgtctgagcaaagacccagaggtgctgagggagcaaggcacgcagctatctggaggaaggtgtccaaggcacgcagctatctggggaaaggtgttccaggcagagggcacggccagtgcaaaggccccggggcaggactgcgcctggggtgttggaggaacggccaggagatccgtgtggctggagcagcgtgaggagggggagagggcggaggagagatgatggagagattgttgagggccctgtggcaggggcgggaggggacgtgggcttttcccgggagggaggcaggaaccatggggggctgcaggcaaagccgggactgccccgactccgtgctcacccacgccctctggtgactgcagggagaacagaccgtggacggtgccaggtggaggggacagggctgctgggggaggaggctgggatgggccgtggaggggcgagcagtgggcggttccttatgttctgaaggtggagcccccagggtttgaggagaaacgaggtgtcagggaggactggccaggcacggtggctcacgcctgtaatcccagcacctttggaggccaaggcgggcagatcatttgaggtcaggagttcaagaccagcctgagcaacatggtgaaa[131 bp omitted]aaaccctgtctctagtaaaaatacaaaaaattagctgggcatggtggcaggtgcctgtaatcccagctgctcgggagccttaggcaggagaatcggttgaacctgggaggcagagattgcagtgatctgagatcacgccactgcactccagcctgggcaacaagagcaaaactttgtctcaaaaaaaaaaagagggaggactgagctgcccccaacgggtgggaagagccagggtgggggcaggtgtagggggcagattgggagtagtgttatggacgtgtgagagtggggcccctgtggataggggctgagtccaggtcaaggtccaggtggggatgggtgtgcgggagattagagccgagtgcctgggcgaggtccccggcgcagagcagagtccagggccgcagccgggcctaagcgtcgaggttgggtgggaggagggaaacgaggtggctatgggggccgaggggccaggcgatggcagggctgcccacgatggggaccgatggcccctcagaagtggtgaggacatgcagctatctggggggtgtgccaggcattgggaacagcctgtgcaaaggccctgaggctgggccgcacctggggtgcagtgtcatgggtcaggccagtcctggcagccctgttcagctcccgctgcggggcggggtctcagggaggtgcctggtgatccccagtgctcgtcatcttcaagcaggcctgggggtggcgggcagccaccagtcgctgttaggatgcaggctctgtgtggtttctgcaggaatgatttttacagagtggggcgaggtgctggctgtggagttagggccctgatgagtagcaagttcgactatctcaggagggttccttcattctgagtctaaatagatgacggcgtgtccaaccgttggctggaaggaggcgtcaagtcctgggagcttggatggtcggggcgggggctgtgggtctgcagactgagccccagtctccgccgtgaccccgggcaaggcaggatctctctgggattcacctgctcctctgagaaaccaggaatggtggggctcgagggctcacgtttataatcccagggctttgggaggctgaggtgggaggattgcttgagcccaggagtttgagaccagcctgggcaacatagtgagacccccatttccaaaaaagataaataaattagccgggtgtggtggcgcacacctgtggtcccagctacttgggaggctgaggtgggagaatggggtgagccaggaaggtcatgactgcagtgagctgtgatcgtgccgctccactcca[140 bp omitted]atagagaaaccccgtctctactaaaaatacaaaaattagctgggcgtggtggcgggcgcctgtagtcccagctacgtggaaggctgaggcaggagaatcgctagaaccgggaggtgagtccagatcacaccactgtgctccagccggggcgacagagcaaggcggctccatctcaaaaaaattaaaaagatccgggaacaatgaaggctttccagatgggctgggctggaacctgagcttgacagacaatagtttggtggcgaaacagaggacacagtgcagagtacagggacgaggaccatctgggcggacagcaggatgggcctcaaatgccaaggagaggtgttcagactggtcgtctccaggcactggggagctatggagggatgtagagttggggagggccgcgtcgagaaggtgcccaggcatccccggctccgcctgccccatcgctgcttggctctgcgctgctggctcccccctccctggcttggccgcagcccggcgggggggtgcgggggcgggcaggccgtggtgtaaccccgtgactctcgtgccagccatgtactcggttgagatcactgtggagaaggacaaggtgacaggggagaccagggtgctgtccagcaccacgctgctccctcggcagccgctccctctgggcatcaaagtctacgaggacgagaccaaaggtacgagcaccccggcccctgccctccctccacctgggccagagccccgaacacgtgtgctcccagcgtgtgggtctggcgtctgccccggaatcaggaccccgattcgatgtgaagcagatgacgctgttcaggccagggcctcaccccctgtggcccacagctgggctcagaggtcgttcagccctgggctcactgcccaatcattcatccactccagaaagctgcctgaaagctgagccgggcaccaggtacccagctgggctctggagggaaatccggaggtagattcagcttctgtccttgccgggtggcaaaccgggcccttccatctggagctcctaaataattcgtttaaataattactgctagcccaagggctcacgcctttagtcccagcactttgggaggccgagggaggaggatcgcttgagcccagaagtttgagaccagcctgggcagcatagcaaggctccgtctctaccaaaaaaaaaaaaaaaaaaaaattaccctggcatggtggtgcgtgcctgtggtcccagctacttgggaggctgagatgggaggatcacttgggcccaggaggttgaggctgtagtgagccgtgatcgcaccactgcactccaacctgggcaacagagtgagaccctgtctcttaagaataaaaaataataataaagaattgctagcgtgacagaagccacagaaaatgcacatccagggggctgtgagaagtctcacagggtgaggatggggccgggggaggcttcccagaggaggcaagcaggggctcatcagagacacgcagtgcatgggaaccacacctggcagagccgcagcccctgcaaaggccctgaggtaggatggagtcagctgggctggagggctgaggggagttgggctgcaggagtgaggggagacgggctgcaggggtgaggggagacgggctgcaggggtgaggggagacgggctgcaggggtgaggggagacgggctgcaggggtgaggggagctgggctgcaggggtgaggggagacggggtgaggggagacgggctgcaggggtgaggggagacgggctgcaggggtgagggggaaccaggttggtcagggagttgaggagctgggctcacgcagggaggagaagggtgctttgcctggaggcagggggacaggcggggccgtgtcctgagggctttgggaagccttgggtgcgttgggtcctgacggtgctgaggtctaatttggttttaagggctcctcctagaggtcaagaggcaaacaggctgtgggagatgccagggaccccaggaggaggagggaagctccacactgaagccccactctctctctttctttttctttttatttatttactttctgaagaaagagtttcactctgtcgcccggcccgcagtgcagcgatgccatcacagctcactgcagcctccagctcctgggctcaggcgatcctcctgcctcggcctcccgaaatgctgagaccacaggcatgagtcactgcacccggcctctttttcttttatgagatataattcgcagaccataaaattccgccttaatgggaggctcatctgggcccgggacattgaggctgcaatgagctatgatggcacccctgcactccagcctgggccacagaccaagaccctgtctcaaaaacaagaaagaggagagaagccccatccccatcagctgtcacttcctgtcccctccccagtcagcgtcactccctatcccctccccagctctggcacccacgcatcccctcctgtctctctggattggcctgtcctggacatttca[131 bp omitted]tctgctaaaaatacaaaaattagctggacgtggtggcggacgcctgtaatcccagatactttggaggctgaagcaggagaatcacttgaacccaggaggcggaggttgcagtgagccgagatcgcgccactgctctccagcctgtgcgacaagagtgaaactctgtctcaaaaaaaaaaaaaagaaagaaaagagaataaatggggtcacacactgcacgtggccttctgtgtctggcgtctctcactgggcgtgacgtccccaaggtgcatcggcactgtggcctgggtcggagcctgactccttttcatggctgaatactattccacgggttgggtgggccatggtgggtttatcccttcttccatctgtagacagttgggctgtttctaccctttggctgcagtgagtagcatgctggggaatttgtgtgcaagtatttgttcacgcccctgctttcgaggcctttgggtgtacacgtaggagtgaactgctgggtcctgaggcgactgtgtggagctccgtgaggacctgctgttttccacggaggctgcaccgtcccgttcccacaggtcgtggatgagggcccagtttctccacgtcctcaccagcgctcgtagcccattctcgtggctgtcctggtggcgtgacgtggggtctccctgtggtttggattcccaaagccttctgttctcagaggcagcttggcctctgcggtgccccagatgctgtcagaggggtccccgcagcccagctctggagtggctttggggtgtggcgttggtggcatctcagctctagctctccccagctgtgtggccctgggaagtccccatgcctcgtcttccggatgaggtcctcacccccatcactccaccctcctcagcctcacctggtccctggggattccagacctgccaggctggacactggttgcttagcaacgggcaggtgatccgtttccatggcagccgagggctccaattcctgtcttggggcagcggccagtgggacacactgagttcagttccgcctgatccagacacaccccaccctctgggcctccagcccaaagtcattgagatgccttgaagcatggactcccctccctgggggcttagaaactgaaagtggagaacactttccttctggtctgtagccaggaacaggagccctgacccttggccgagaggaggcgagtccctgggaccccccttgcgtccctcccaactcccagcgtggcccaggcagccgtgtttctagaaggaatttgcagggctgtgagctagggctggtgttagatcatagcagggagccgtggggtgctgaaatccggtccttggagagtccaacacacctcaagaaatgtcaagtcagagacacacagataaggaaatttggaaagacttgagaaacacatttagcaagattgattatatgtataaaatgctacccagtggagaatacacattcttttcaaacacagaacattgtcagaaagtgaccaccgtggcccaggctgccaaggaggttttaggactgttaacagagtttgtatcttctgctctgtgttcctctcctccctgaaatttaaaaacaccctctaaataaattgtggcttcctgtggcaatcaatcaaact[137 bp omitted]aggtgaaaccccatctctactaaaaatacaaaaaattagccaggtgtggtggcaggcgcctgtaatcccagctagtcaggaggctgaggcag[136 bp omitted]aggacacagccaaagcagacctcagaggaaaatgcatagcctttagggaagctcctagaaaacaaaaataaatgaatgaaactttaactcaagttagaatgaatgaaaatttcaatttaagatcaatcaaatacacccatagatggaaaaaatcagaatccctgtaatggccaggcatggtggctcacacctgtaatcccagcactttgggaggccaaggcgggtggctcacctgaggtcaggagttcaagaccagcctggccaacgtggtgaaaccccatctctactaaaaatacaaaaatcagccgggcatggtggcgggtgcctgtaatcccagctactctggaggctgaggcaggagaattgcttgaacctaggaagtggaggttgcagtgagctgagactgcgccactgcactccaccctgggcgacagagggagtcaaaaaaaaaaagcagcaggcacggtggctcacgtgtgtaatcccagcaccttgggaggccaaagtgggtggatcacctaaggtctggagttcaagaccagactggccaacgtggtgaaaccccatctctactaaacgtacaaaaatcagcctggtgtggtggcaggtgcctgtaatcccagctactctagagactgaggcaggataattgcttgaacctggaaggtggaggttgcagtgaactgagatcgtgccattgcactccagcctgggcaacaagagcgaaactccatctcaaaaagtgaaagaatccctgtaacctccagttccccagggtgggtggtcctgtcttgtagaagagaaacaggccccgatgcggggaaggagcaggggtttggctctgtgaccttggcccagctgtgtcccttctttgaactttcatttttgctatctttacagcggaaatgaatccctacttttcagggtgatcacgtgggagctagttggctaaagaatatggaattacaggccaggtgcggtggctcacgcctgtcatcccagcactttgggaggctgaggtgggcagatgacttgaggtcaggagtttgagaccagcctggccaacatagtgaaaccccagctctattaaaaatacaaaaaattagccaagcatgttggtgcatgcctgtaatcccagctactcaggaggctgaggcaggagaattgcttgaactagggaggcggaggttgcggtgagccgagacagtaccactgcactccagcctgggcagctccatctcagaaaaaaaaaaaaaaaatcccaattcattcctttccactctttcttggttcctaataaatgtttttgtgcttataaattttcctcattgtcggctgggcctggtggctcacgcctgtgatcccagcactttaggaggccaagacgggcggatcacctgaggtcaggagttcgagaccagcctggccaacatggagaaaccccgtctctactaaaaatacaaaattagctgggcgtggtggcggattcctgtagtcccagctactcaggaggctgaggcaggagaatcgcttgaacccgggaggtggagcttgcagtgagctgagatcacgccattgcactccagcctgggcgacagagtgagactccgtctcaaaaaaaattttttttcctcattgtacggcattggctgcatccacagatgccaacagggggctttaattgtctgtcagttctgacggtgtaatctagttcgtgatttcctctttagcctggaggaggatacaagccttgccaaggtttccctcctgcctgagccaggtcactctctctgtccctcctgcctggagctgggtcattctctctgtctctccttgtacagtggtccatgctgtggacggcaccgccgagaacgggatccaccccctgagctcctccgaggtggacgaactcatccacaaagcggacgaggtcacgctgagcgaggcagggtccacggccggggcggcagagacccggggggctgtggagggggcagcccggaccacgccctcccggcgggagatcaccggtgtgcaggcacagccaggcgaggccacgtccggcccgccggggatccagcccggccaggagcccccggtcacaatgatcttcatgggttaccagaacgtggaggatgaggccgagaccaagaaggtgctgggccttcaagataccatcacggcggagctggtggtcatcgaagacgcggctgagcccaaggagcctgcaccacccaacggcagtgctgccgagcctcccacggaggccgcctccagggaagagaatcaggcggggcccgaggccaccaccagcgacccccaggacctcgacatgaagaagcaccgttgtaaatgctgctccatcatgtgagccggcccccgagaccccggcccccaccccacaccacagacacccaccagcccggcccctcccggcgcctgcccaccctccacccacagcctcacgggtccaggacttggcgtgttgttacatgttccttccgagttttctttcgctggaaagagggacaggggcccccacccgtcaccacgccccaacactccccccgaaccagagccgtgcacttgtgcctggtaggagagagacaggacagacccgcttttcccgagacaaggaccccccatgtcacggcagcttcacagacgcggctcgcgcccaccggggtcctggcgggtgggacccgcagcctccacgcggcccaggccagcctgccaccctctgggcctcctacctgtgcctttctctgaggggacaccccgccagagagggccccgggagccgggggtgggtactgaggcctgctcaggccctggaagtgaggctctatggggttccctggccaaggcgctggccccccaatctcaggcagttggggtgaggccgtgcctctttgggggctaaaggtcttgggtggaggacaggcccctctgctgtgcccctatgccctgtgtgggcccaaccagtggacaatggagtctgggggagggggaaccccggggacatgcccccacccgggaggggccggtaacccctgggctatcttctagacggggcgaaccaggggtcattgacctgccccctgcacagggcagggaccgagtgagccactccttgtcccgagctcccgcccccactgggccctccttcctcctggtgctaatttggggaccccaggggccgcccccggcctcttctccatcctgcttggaccagggtcctgggtcttcccaaccataccccgagatcaggccccacctgccagctctactgggcttggagcacgtccgggcagtggagggagggacacagcctgggacaggaagcctcttgggttggagcaggagaccctcatttgccacccagaccaatgtgagcctgcccccagccccctctcattggaagtggcaaggggcttccctcctgggggcagctacactcgtccccagaggcacattcgtgcacattctcacagacaccgtctcacacgttggctttggacaaccaggccccaacttggtccctgccctagggacctccagcctggtgcccagtgctcaggccacctcctggtccagtcaccacctgcagcctcggcagggcaggtacaggggccacctcggatgggagcctgggtccctgcctccgctctgcccctgggtggctgggaggagaggccctctcgggggtgacctgggcgtcagccgtggaaccccctcctcctccctggagtctgcctgagtccctcgagccgcgagccttcgctgaagtgcccttgctataaccccctctgcttctggtgtgtgacgaggcccccgatgttcttgattttcccagagaagcaaataaacagcgtgaacagccccagttcctggagttcttgcctttcaacctggcgaggaaggcgtggccaggccagggggtggggcctgccggcctttgagccattaaagggaggctgagcagggttgcggtgtgctggcttcacctgcctgcacccgctcaccctgagcgccttggggtggtgggaggcgctggaatccccactgtgcaggtaaggcctggctgtaaggggctgctgtgggggggcaggactggcttcccggggggccctcgggttctgcggccgccccgtcctgtcctttgttcctccctttgctgggctcacagcccctgggtgatgacagagggtcccctggacacccacaagctctgtagagaagccggcccctgggaaatacacaggaggcctggggaggaggtgtctgtagagaccagtgtcatgctcacgggaaggtgctgccccgccagccccactctctcacgctgtagtcttggagaagtcgctgcctcctctgggcctcagttttcccatctgtaaaataagccttcgtggccgggcacggtgtttcacacctgcaatcctagtactttgggaggccgaggtgggcggatcacaaggtcaagagatcgataccatcctggccaacatactgaaaccctgtctctactaaaaatacaaaaacttagccgggcgtggtggctcacgcctgtaatcctagctattcaggaggctgaggcaggagaatcgcttgaa[131 bp omitted]gggcgtgggacgtctccacagtgcccccagctcatgggcgatccagcctccaccctgctggggcctcagttttccccgatgaggtggtgagtgtggtggagagcactgctgagggaactcaggttccaattccagcctaaacccccgccattcctgaggcgcgattttaagctttccgtacctccgtttccctatctacaagccagggagaaaaggacgtgaagggggtggcgggaggcggcggtgggaggcgccgtgaggccgcgcaccctgagctttcacacacccagcagcgttaggtgccacgctgtcctttgggggccctttatccagatttgtccttaaacacccccatcttggccaggcgccgtggctcgcgcctgtaatcccagcactttgggaggctgaggcgggggcatcacctgaggtcaggagttcgagaccagcctggctaacgtggcaaaaccctgtctctactaaaaatacaaaaatagctgggcgtggtggctcatgccagtaatcccagctactagggaagctgaggcaggagaattgcttgaacaggggaggttgccgtgagccgagatcgtgccactgcactccagcctgggtgacaagagcgagactccgtctcaaaaaaaaaacacaaaaaaagcacccccctcctgagcagccctgctggattcgtagctgggggcctttttactcgaagaagagactgaggttcagaggggctccacaagcagcccctctggcgtaggtcaggacagagccccagcctggggaactgaagtccctgccccctcagctgtgttccctgccctcatagacggcgctaggcccagtggcccgacttccccacagatgctgggctccccacagtcccagcaaggcctctgcaccttgactaagaatccaggaggaccatgggcgcctgagggcctctgcgtccccatctctcggggtggcctgggtcttttgacggcctcgtgcggttcttttttttttttttttttttttttttttgagttggagttttgctcttgtcgcccaggctggagtgcagtggtgtgatctcggctcactgcaacctccaactcctgggttcaagtgattcttctgcctcagcctcccaagtagctgggattataatagcgtgccaccataccccgctaaattttgtatttttagtagagacggggt[135 bp omitted]cctagggaattcctcccagcagccctgagggagcccgggcgtgatgttcccccacgtcccggaggagaaaacagggctaagagaggtcaggtgggatcagaacccaggccacaccaaacccccccgagtctgccaaacctggtttatgcaagaagggggccatctaggggagttgccccaaggggtgggctgggccagaaggcacggacgggattgggactcagcccctccggccccccaggagacacaggccactgtgcacgctgagctgctgtgtggccctggacacctgctgaccctctctgagcggtgctgagaggcggtgggagggccaggcagccaagggaggtttcggctgagttctggctcctcggggccacctggaggccctgggggtggaggggcagccggcagcgggcacggtgcccgcccttgcccagcctggtatcctctttctccctcctcctcctctggactttgtttcctgatcccaggtggggctggggggagggggcacacctgcctcccctgggtggggcctctgttccctggcaacctggcgggcagggcggagctgggaggcctctgtgcccatcgaggagtcagagtggaggctgcagactgtggagccgggagccggcaggtgaggctgggggcgccccgggccgggccgggcggggatcctgtgtggggcggttggatccacatttggcgtgggagcgtcatgtgtctgtgggcggggtctgcttgcctggcggcacttgggatccagggaggccccctgccccaccccgtcaccctcggagcctccctgaggcacctttccctctgcccccgctaggtactctggggcctcaagggcacccactgggagagcagagaggcccttgtccctgaactctgctggggcttttgaaccccaaatcccagagccctccaagggaggggccgggttggcacccccatggtcagaggccagaggggcccctccatggttctgggaattccagaggcttctggagagatgcttatccgtcccaccaggcccctgactgggaggctctgggcagtaaacacccccgtggggctgggggctggtttggggacacggaggaggggtggctgagtacaggcggaaggagtctcaggccggggctggggacttggcctgggtcctcgggtgggggtgaggtggtagcctgggatcccgggcagccagcagggactcggcccagcgtctgccggtggagctccgcccaggagcccaaggagctgagatgactcaagggtgactgcaaccctgagggatgggaaaaaggaacggggccctcccttctgcatggcctccttgtctgagtctcggccccacaagggaacctttgcccctcacatagagccaactggctgatgaggaaggaggtgtggcaccagggtccataaacccagtttcattctggtatcaacagagttcagggtgaggctgggaggagcaacccagggggcttcctgtaggagggggtgatttggagcaaagtctgaaaactggcttcagacacttgctctgtcatcgctgtgtgacctcagatgagcaggttctcctctctgggtcccagctccctctctcgaaaaccggagtcgaaaacggttccaaggtgttgcaggaagagtctcaggacgccgaggtccttagccaccgccgggccttgcaggggccatcttccgtcctggggctcttcccccgagggcagcgccgctgcccaagaatgccggccatgagagccgccgtggatccaggggtttttttggccgacacagtgaaaccccatctctactaaaaatacaaaacttagccgggcgtggtggcgggcgcctgtagtcccagctacttgggaggc[136 bp omitted]cacaggcagcaggggagggggcccagtggccttgaacccaagagctggaccccaggccccacccgctggcttcagtgaatcactggggaggaatgagcagaggaggatgcgtgccttcatccccacccaaccccgaccccactgggagacccggcacctgctcgaggctgggcggacagctccctttctcccggagttgacgtctgatgtgggttataaatcccgctgtgtaaacgtctgtccactcactgggcaaacattcctacacccgccctccccggggagctccagggtgcagggcgtggacctgcccagcccttcagggccagaaggcacggtggagccggtctgcattccgcaatgagcccgacccccacgtctgagcagctgggatgagtggtgtttgcccagccagtatttattaggcgcctgctgtataccagactctgggctgcaggaagggtgctgacctgtggccacagcaggcgagagcgaggcctgggctgacggtttcgggtgggagaaggcaaggccttccgtgagctgggcaggcggcgtccacggaggaggaggcctcgggtcaggggagccatctgtgcgtcacgctttgggaggaagctcagctgtttgtgtgggatttattcaccaatgccgcctggttttcaatgtttcccctattttagtttctgacatttgatacgcgcggaagattgcatgacacattgcgtgtagtttcaacacggctccccacggtctctccactttatgctgtttgatgccactttccagttcagagaggggctaagtttttctttttttttctttttttctttttttttttttttgaggcggagtctagctctgtcaccaggctggagtgcaatggtgcgatctcagctccctgcaagctccacctcccgggttcacagcattctcctgcctcagcctcctgagtagctgggactacaggcgcccgccagc[139 bp omitted]tctgtttaaaaacaaaaaaaaatgctgctggttggtgtaaaggcagcagatctaaataatagccttggtggcccgggagcgacagtcctgctttgtgggggtttgtttttcttttgagacagggtctttctctgtcacccaggctggagtgcaatggcacaatctcagctcaccgcaacctccacctcacaggttcaagtgattctcccacctcagcctcccaagtagctgggattacaggcctgagcccctgtgcccagccgacagtgctttttttaggagtcaggagctcaagcttttgagatccctgtgtcttcaggtgaggcttcctttcctcaactatgaaagatgatgtctgctggacacggtggctcacgcctgtaatccctgcactttgggaggccgaggcaggcggatcacctgaagtcaggagttcaagaccagcctggccaacatggtgaaacccgtctctactaacaatacaaaaattagccgggtgtcctggctgggcgcggtggctcacgcctgtaatcccaacactttgggaggc[269 bp omitted]tgcccgtagtcccagctactcaggaggctgaggcaggagaattgcttgaacccgggaggtggagattgcagtgagctgagatcacgctaccgcagtccagcctgtgcatcgcagcgagactctgtctcaaaacaaaagacaatacctaagacgggtgctgggtacaaggcctgacatgaaggaggtgttcagatgatggctctgggggaggggcaatctgggttacttcctggaggaggtgtccatgggcttcagcagaggaagccgtggagaagcagaaacaggcagcctcgagacagagagagctgcaggtagaggaggagggcgaggtttggggtggaggaagagggcctggtttggggtggaagaggagggtctggtttgggttggaggaagagggcctggtttgggtggaagaggagggtctggtttgggtggaagaggagggtctggtttggggtggaagaggagggcctggcttggggtggaggaagagggcctggtttggggtggaagaggagggcctggtttggggtggaagaggagggtctggtttggggtagaagaggagggcctggcttggggtggaggtgcccacagaaattggggtttcgtgctaaggccaggagcagggtgtgagaactgtgccctgcagatgccaggagccacagaagcgatgcgagcaggtgtgtgacctccgggaaggctcctggaactgagcccagcagcaacctggacccttgggagagggcgagagccggaaggcactgggtcagggtgtcacccgctcgctccacggccccacctgggcccagcgggacaaggtccacggtgttcctttgcccatcctggctttatggcgacaaggcccaggcggggatgttgtctcagatgggacgaggtgtccagctgggcagggcagggtggagaaccaggatgtgggagccgggaaactggagttgctgtcagtccttctctctgggcctcagtttctccatttgacatcccttagcaaggggccatctgtaattgtcagatggaaaaatcccacaccaggagtctcagagtgagctcagggtggaaaggctcagtgcacaggagacacagataaatatggtgcggccaaggaaggcttcagagatcaaggctgaggccaggcgcggtggctcacgcctgtaattccagcactttgggaggccgaggcgggcagatcacctgagctcaggagttcgagaccaacctggccaacatggtgagacctcgtctctactaaaaatacaaaaaattagccggacttgggaggttagcgcctgtaatcccagctactcaggaggctgaggcacgagaattgcttgaacctggaagcagaggttgcagtgagctgacattgtgccactgcactccaggctgggcaacagagcgagactccatctcaaaaaaaaaaaaatcaaggctgagctggactccacagggcaggtgtgtgtgtctgggagataaggtgggcagggcaccctgattttattgggctgcaaatgttagaaacatataatgcgagttgttggggtagtaaccgggacattcagagattcaggtatggttggaatcagggagcttaaaagttttcaggatgctttgctggtgttggggttgctgtcaagcaagctgtacccactgggggcatttacgtccccagcaattcactatctcattccatcagcctaacaagaccagcgggaagagggtcccatcttctgcattaattgtaaagtcccagggtctcatgtcattggctagactgggtcacatgctcatctctgaaccaattacagaggccagagggtgaaatgctctcactggctggactaggtcacttacccatctttgaaccaatcacagaggccagtgggtgggatgctctgattgatcaggatgagtcacttacccatccctgaaccaatcacagaggccagagaatgggctactctgactggccaggctgggccatttactcatccttgaaccaatcacagaggccagaaggtgggatgctctgattggccaggctgagttacttacctatcccttagccaatcacagagattagacaatgggctgctctgagtggctgtactgtgtcacgcacccctaaaccaatcacagaggttagagaatgggatgcactgattggctggactgtcacttacgcacccctaaaccaatcacagaggttagagaatgggctgctctgagtggctggactgtgtcacttacccatccctaaaccaatcacaaaggccatttgatggaccctttgccctttgggggactggaggctgttcctctccctaggtgctctgacttgatggccctcatttccttctcctccctcagtaagcccagaggtctccaccccacgggaggaaggctgaggccaagaccccggaagagatggaccgcgtgaccagataccccatcctgggcatccctcaggcacaccgtggcaccggcctggtgctggatggagacaccagctacacataccatctggtgtgcatgggccccgaggccagcggctggggccaggatgagccgcagacatggcccactgaccacagggcccagcagggcgtgcagaggcagggggtgtcctacagcgtgcatgcctacactggccagccgtccccacgggggctccactcggagaacagggaggatgagggttggcaggtttaccgcctgggcgccagggatgcccaccagggacgtccaacatgggcactccgcccagaggacggggaggacaaggagatgaagacctaccgcctggatgctggggacgctgaccccaggaggctgtgtgacctggagcgggagcgctgggccgtcatccagggccaggcagtcaggaagagcagcaccgtggccacgctccagggcactcctgaccacggagaccccaggacccccggcccacctcggtccacgcccctggaggagaacgtggttgacagggagcagattgacttcctggcagcgagacagcagttcctgagtctggagcaggcgaacaagggggcccctcatagctccccggccagggggacccctgcaggcacaaccccaggggccagccaggcccccaaggccttcaacaagccccacctggccaacgggcacgtggttcccatcaagccccaggtgaagggggtggtcagggaagagaacaaggtgcgtgctgtgcccacctgggccagtgtccaagttgtggatgaccctggctccttggcctcagtggagtccccggggacccccaaggagacgcccatcgagcgggagatccgtctggctcaggagcgtgaggcagacctgcgagagcagagggggcttcggcaggcaaccgaccaccaggagctggtggaaatccccaccaggccgctgctgaccaagctgagcctgatcacagccccacggcgggagagagggcgcccgtccctctacgtgcagcgggacatagtacaggagacacagcgtgaggaagaccaccggcgggagggcctgcacgtgggccgggcgtccacacccgactgggtctcggagggtccccagcccggactccggagagccctcagctcagattccatcctcagcccggccccagatgcccgtgcggccgacccagctccagaagtgaggaaggtgaaccgcatcccacctgatgcctaccagccgtacctgagccccgggaccccccagctagaattctcagccttcggagcattcggcaagcccagcagtctctccacagcggaggccaaggctgcgacttcaccaaaggccacgatgtccccgaggcatctctcagaatcctctggaaaacccctgagcacaaagcaagaggcatcgaagccccctcggggatgcccgcaagccaacaggggtgtcgtgcggtgggagtacttccgcctgcgtcctctgcggttcagggccccagacgagccccagcaggcccaagtcccccatgtctggggctgggaggtggctggggcccctgcactgaggctgcagaagtcccagtcatctgatctgctggaaagggagagggagagtgtcctgcgccgggagcaagaggtggcagaggagcggagaaatgctctcttcccagaggtcttctccccaacgccagatgagaactctgaccagaactccaggagctcctcccaggcatccggtgagaaggggctccagggagtggctgcttggctcagggtctcagaggttggagcaggggagggtggggaggtggagtttgaggctgtcaaagggctggggttggggagacattgcctcctgactgttcatcccctcagtcgctggtttgtctgcctgtctattaaaaatgtagattttggagagaaatgtcaactttaccttagggcttttgctttatggatttggatgccttgttgttaggcgcataaatgttcatatatgttttgtgt[137 bp omitted]tgcctcagcctcctgagtagctgggattacaggtgcccaccaccactcccggctaatttttgtatttttagtagagacaggtttcatcatgttggccaggctggtcttgaactcctgacctcaggcgatccaccctgccttggcctcccaaagtgctgggattacaagcatgagccactgctcccggcctgttcatatatgtttatcctcttggacagttgcacctttttgacaatatgaaatattccttgtgtcacttttaatgttttttttttttttttttgagatggagtctcgctctgtcacccaggctggagtgcagtggcgcgatctcggctcactgcaagctccgcctcccgggttcacgccattctctcgcctcagcctcctgagtagctgggactacaggcgcctgcctccacgcctggcta[176 bp omitted]tccagtttctcctgactggctactttggtcaatctgtcagtttcccggatagtcatctgctctgtctgtccatacatctgtctccttagctgctggctagagactctgtctcccgagcagaggtctgacaaatgttctaatgttctgccctccctgctcccctacaggcatcacgggcagttactcggtgtctgagtctcccttcttcagccccatccacctacactcaaacgtggcgtggacagtggaagatccagtggacagtgctcctcccgggcagagaaagaaggagcaatgggtgagtctggaacccgtctctgcagaggccaggctgaggtcagacagcccctattagggccacaggaagttcaagcaggactcaagcctgacctgggttcaagcactacccccacccctggccgtgcctcagtctcctgcagatgtcaggtagaagatgataaacttggtgtccttgtatctctgggcttctgcttggagaggccatataagctggggtctttgtccccatcaggaggtcatctccaggatcaaagaccaaaggaccaactctgcttggaggaggaggacactggcaatttgtcatcgtcaccagcattagtttctttttttttttttttttttgagacggagtctcactctgtcgcccaggctggagtgcagtagcacgatctcggctcactgcaacctccacctcccgggttgaagtgattctcctgcctcagcctcctgagtagctgggattacaggcgtgcaccaccacgcccggctaatttttttgtatttttagtagagacgtggtttcaccatgttagccaggctggtctcaaaccgatctcaagtgacctgcccacttgggcctcccaaagtgctgggattataggcatgagccactgcacctggccacagatatttacttctaagaaagagagagagagagagagaaggcaggagggagggagggatggagggaaggaaggaacaaagcgaggaaggaagggagggagggagagggagagacggagggatgtgtctgtcacacgctggctcggggcttccaatgaaccacacctttagcaccctggtggtctcacatgcccagggttaggcagctcatgaacccaggcttgactccaggacctacaggccacagagctttgccttaggggttttactttatgaattttgatgccttgttgttagacatgtaattgttcatgtatgtttatcctcttggatgagagctccttttgtcagtatgaaatattcctcacgtcacttttaatgacacgaggaatatttagtgccatgaggaatattatgtccttttttttttttttttttttttgagatggagtctcgctctgtcacccaggctggagtgcagtggcacgatcttggctcactgcaacctctgcctcccgggttcaagcgattctcctgcctcggcctcccgtgtagctggaattacaggtacgtgccaccactcctggctaaagggaggctgctagggaggctccatccgggaggtggaggttgcagtgagccgagatcgcaccaccgcactccagcctgggtgatagagcaagactcagacccaatataaataaataaattaattaattaaattaaataaatcatgaatgttggacagaggctgcactgaggggaacagcatgaggaacagcaagggggatggctgtgagtctgggtgatcgtgggacacgtgttgagaacactcagggcaggggatgccttccactcttccccaaatggtgacagagagggctgtgtgggagctctggtcggactctgcaccgggcagggcagaaaggcctgggctgacttgtgttcctttcctgtagtacgctggcatcaacccctcggacggtatcaactcagaggtgagtatgctcctgggcacgaagactcaagtctttcccccccacatctgtgcccctgcacacaggggccaacggaagccccttcctccaggtgtggggatcgtattgggtgtcttctcaattggtagtgtctgctcagggtggattttgctgtgatctgcttgtgatgtctgccatgggcatggattaggagaagagggttcacatgccacctctccaccacgtggtgaaggtttgtgaggttaga[147 bp omitted]ctgcctcagc[215 bp omitted]cgctctgttgcccaggctggagtggagtggcttgacctcggctcactgcaacttccgcctttcaggttcaagcgattctcctgcctcagcctcccaagttgctgggattacaggcacccaccaccatgcccagctaatttttgtatttttagcagagatggggtttcaccatgttggccaggatggtctcgaactcctgacctcaggtaatcctcccgcctccacctcccaaagtgctgggattacaggtgtgagccaccgcacccagccaaaggcactttctttgaggaaggtatgcatctgagactattcaagccaagccccctcagtcggtttatggcacacgtgtgtggccctcctttttatttttatttttttttatttttacttttttgagacaggctctcactctgtcacccaggctggagtgctatgatgtggtcccagctcactgcaaccttgacctcctgggctcaagcaatcctcccacctcagcctcccaagtaggaacataggaatgtgccactgcacccagatagtttatttttatttatttatttatttatttttgtacaggcagagtctcactaggttgcccaggctggtctcgaattcctgcattcaagggatcctcccacctcagcacaccaaatttctgggattataggcatgagccactatcgcctgacccctctttgagctgaatccgaaatgccaaatacattggacaggcacggtggctcacgcctgtaatctcagcactttgggaggccgaggcgggaggatcatgaggtcaggagatcgagaccatggtgaaaccccatctctactaaaaatacaaaaaattagccaggcgccgtagcgggcctctgtagtcccagctactcaggaggctgaggcaggagaatggtgtgaacctgggaggcagagcttgcagtgagccaagatcgcgccactgcagtccagcctgggcaacaaagtgagactccatctcaaaaacaaacaaaaaagccaaatacagacatttttcctgccctggagctcagcatgagttagcatattctttgatcatattactaggagtagagggtctgaaacagaggaggggatcctactttacccccgttctaggcctctctaatgaattggcagttggaggagacatcttgggggtgtggtaggacctggatcgggggaattcatgcctcctttttgcaggtcctggaagccatacgggtgacccgtcacaagaacgccatggcagagcgctgggaatcccgcatctacgccagtgaggaggatgactgagcctcgggatggggcgcccaccccctgccctgccctgaccctcgtgggaactgccaagaccatcgccaagcccccaccctaggaaatgggtcctaggtccaggatccaagaaccacagctcatctgccaacaatcccaccatgggcacatttgggactgttgggtttttcgtttccgtttctatcttcctttagaaatgtttctgcctttggggtctaaagcttttggggatgaaatgggacccctgctgattctttctgcttctaagactttgccaaatgccctgggtctaagaaagaaagagacccgctcctccactttcaggtgtaatttgcttccgctagtctgagggcagagggaccggtcaaagagggtggcacagatcgcagcaccttgaggggctgcgggtctgagggaggagacactcagctcctccctctgagaagtcccaagctgagaggggagacctgcccctttccaaccctgggaaaccatccagtctgagggaggaggccaaactcccagtgctgggggtccctgtgcagccctcaaacccttcaccttggtgcacccagccacacctggtggacacaaagctctcacatcgataggatcccatgaggatggtccccttcacctgggagaaaagtgacccagtttaggagctggaggggggtctttgtcccccacccccaaactgccctgaaataaacctggagtgagctgcctgccttggtccctgcctggtccggacaaagtcccctgggcctccactctctgtttcattttcttggcgacattaggttccaccccgctaggccgtgagcctgtggggctgtcaggttcccatgggggggttgccagcatctgcatgcagtaggtgcttagctgatgcttgttgagtgactgacaattgatcatggagaggcaccttcagcaacaccaggcccggggcccaacctcaccagcccggctcctccagccccgtctcaccacgtccatcgcagtacccagggtgcttattaagcatttgctgaatccctcaccactctggtctcagaggaggccggagggtcattaattcggctccgcatgtataccaggctcacatccagggaagccagatcctactggtcagaggcgtgggcgctggacccaagtcctggctctgctgcctgctgtgtggccttgggtgggggggggtcctctcactgccccatgcctcagtttccctctgacacacagggataacgataggaccaggctcccgggcagtaggagttaatttacgtaaagctctcggcacatggggaccattgacgttggattcagtgcctgatggcaggggcgtgtcctcagacaccccccaaagcaggcctcggcccccaggctcccccaaccctgctgggagcagcgggtgttaattacacctaggccagtgtctcctccttggctgctcagtgtccgctgcgctgcctcagggaaaaccgcgcagccacgccgggcccaggcaggcagatgtggaaccgaaatagctgggcagtgggggctgtggggaccctggggaggcgggggaagggggctgaggggctacatctgggcagagcagagactgagggaggagggagagcccctgtcttcagggagaccccagtctgatggaggaggcatctgccttcacagagatcccaggctgatggaggaggcccctgcccccagggagaccccagtctgacggaggaggcatctacccacagaggggccacagtctgacggaggaggcctctgccctcagggagaccctatctgatggaggaggcatctgccctcgggggaccccagtctgatggaggaggcaggttatgtgaccatagagggaggctcagtggccatagttggtgacttctttcatgtcggggcaattctattccaaccccaagaaccaaacgtggggcctgcgggaagggagggcctcacacacagtcctgggtgagtcccatcagtttctccactgtctgccaccccatcttcccccgatgccccatgttctgtccctctgtccctgtgctctgaggatgtgtgagcctccactggctactataacaaatcaccacccacctaatgacttaaaacagcagacatggttgggcgcagtggctcacgcctgtaatcccaacactttgggaggccgaggcgggcagatcacctgaggtcaggagttcgagaccagcttgaccaacatggtgaaagtccgtctctactaaaaatacaaaaaattagctgggcctggtggcaaatgccagtaatcccagctacttgggaggctgaggcaggagaatcacttgaactggggaggtggagattgcagtgagccaagatcgtgctattgcactccagcctgggtgacagagtgagactctgtctcaaaaaaaaaaggcaatctctccctgtctctctcaggctcaccttcctgcctcctctcgtgagggccctatgaggacactgggcctccatgtcacccaggatgttctcctgtctcacggtccattactcagtcccatctgcaggtgcttctgccacgagaggtgacacggccacaggtcccggggattaggaaagggatgtctttggggccattgttctgcccaccagaggatctcgacatcccccttctccgtgactcttcagtcacctctgctcagggccggccaggactgttgcacaggctgtgccctgcacaagccccctgccaagaccaaagggcaaggctctgtgtgcggccagggtccccgtcttcagtgtccctggccctggctgtggcctgttgccagacaccgcgtcaccaaggggtgcattattcccacatcatcccagttggacggtcacctcaccctgcccatcgtcctgccagcaagatggtcccacagcggcctcagttctcagaggctcggcagggtctcccctgaccccgtaatgcccctcactgcccctgggcgctgggttcaagaagaaccgcctgcttcgttgcaggaagtgatgtccacccccaactctggatcggaagccacgatctatcctccagacccaacaccaggtccccagccctttatctctcctgtctgtctgtccatttctggtgttcaggcctctctctccacgtctatctccctgtttctgtccctcctgacctctctctttttccatgatttttgctttcctccctccc[134 bp omitted]cccacctcagcctcccgagtagctgggattacaggtgcccgccaccacgcccggctaatttttgtatttttagtagagacggggtttctccatgttgggcaggctggtctcaaacccctgacctcaggtgatccgcccgcctcggcctcccaaattactgggattatgggcgtgagccaccacgcccggccctcatcctaaattcttaaaacctgctctcctctcagccatgattttctttgtcctgtgccataaagaattctcagaagcaggatgcagcttctgctgctcaagggtgagcccagccagtgggatctggtgtcgctgcccgcagacccctcagtcaagagcggggtggggggcagcaggagctacagtaacagcccggatggtcctgctcctgaaggcaccccaccctgctgtccagaggagagaccgaggctcagacatttgagccccacataacccagcctgccacacaccgcagactccaacagtgtagcccctgtaccccagaagtcacttcagcaaatcactcagggctccacctcacatctgtccccaagtccttggggacttgctcactcagcagaagaccaagagaagccagatgcagtggctcacacctgtaatcccaacactttgggaggctg[135 bp omitted]aggcaggagaatcctttgaacccaggaggtggaggttgcactgagccaagattgtgccactgcactccggcctgggcgacagaacaaggctccgtcctaaagaattaattaattaatttaaaaataaaaagaaaatgtgcactttcatcttgtattattctgtccttttgtttgtttgagataaagtttcgctccatttgcccaggctggagtgcgtgatctcggctcaccgaaacctctgcctcctgaattccagtgattctcctgcctcagcctctcgagtagctgggattacaggcccacgcccccaccatacccagctaattttgtacttttagtagagacagggtttctccata[137 bp omitted]agtcactcacacctgtaatcccaccattttgggaggccgaggcgggcggatcacaaggtcaggagatcgagaccagcctggccaatgtggtgaaaccctgtctctactaaaaatacaaaaattagccgggcgcagtggtgcgcacctgtaatcccaattactcgggaggctgaggcaggagaatcgcttgaacccgagaggcggaggttgcagtgagccaagatcgcgccacggcactccagcctgggcgacagagcaagactgtgctcaaaaaaaaagatttagtttaattcctgtaatgagtcagccccttggaaaatcagacagaattctgcctgctgagcagacacattccagaagttactctgtgagaggtttagacgaattcctagtgaaatttccaggggcgggagagcgtgtctggaaggtctgcggacatcacagcaatcacagaggcctttggggcgggcaaaactgtccgctggcgctcgctgctagcaggagggagttcatattctttcctggtttcctcctggctcagtgtatcatgatatgccagggaaaggaggagaattctcttttttgtttgtttggttttttgagacagagtctcacgctgttgcccaggctggagtgcagcggcgcaatctcagctcaccacaacctctgcctcctgggttcaagcgattctcctgcctcaacccccggagtaactgggattacaggcacccaccaccacgcctggctaatttttgtatttttagtagagacggggtttctccatgttgggcaggatggtctggaactccagacctcagatgatccacccgcctcagcctcccaaagtgctggggttacaggcgtgagacactgcacctggcctcaactccattttaattaaccctgcaggggccaggcatggtagctcatgcctgtaatcctggcattttgggaagctgaggcaggaggtggatcacctgaggtcaggagtttgagaccagcgtgaccaacatggtgaaaccctgtctctaggaaatacaaaaaattagctgggcgtggtggcaggtgtctgtaatcccagctactcgggaggctgaggcaggagaatcacttgaacccaggaggcaaagatcgtggtaagccgagatcgcaccattgcactccaggctgggcaacaagagcgagactccatctcaaaaaataaaaataaataaataaaaaataaataaaaataaaaaaaattagccaggcgtggtagcgcgtgcctagtcccagctactcaggaggctgagacacgagaatcacttaaacccgggagatggaggttgcagtgagctgagatcgcgccactacactccggcctgggcaacagagcaagacttcgtctcaaaaataaataaataaataaataaataaaataaagagatttaggagaggacacaagcaaacataactcagactgactttggcaaaactaggctttatgggttcccgtaactgaaacatcaatgtagggccagcttcaggctcagctggttccaggtgccacacagcatcctcaggttccttcggtgttgggagctcaggctccaagcccaggacagattcccagctctgccacatgcccctgagggaccctgggcaaggcctacccctctcccagcctcagtgtccttatctgtaagtgaagtcgccacattgacatccctgccctgggggacgtcatgag[138 bp omitted]tggctaacatggtgaaactccgtctctactaaaaatacaaacaattagccgggcgtggtggtgggcgcctgtaatcccagctactcgggaggc[144 bp omitted]caagtaaattaacgaattgtcaccagacaatgacttccatgtgactttctggtgtgagccggagaggagccgatgcacgctgccaccagagggcggcaaacaccaaggatgcagccgcggccctcgccccgccagggagaaaacgcacctgccgccactctcaccttctcattcccgta[131 bp omitted]ctggccaacgtggcaaaaccccgtctctacttaaaaaaaaaaaaaaaaatagccgggtgtgatggcgttcacctgtaatcccagctactcaggaagctgaggcaggagaattgcttgaacctgggaggtggaggttgcagtgagctgagattgagccattgcactccagcctgggtgacagaggaagactccatctaaaaaaaaaaattatttgtagagatgacagagtgagactccatctaaaaaaaaattatttgtagagatggggttctcaccatgtttcccaagctggtcttgaactcctcaagtgatcctcctgcctcatccccacaaagtgctgggattactggtgtgagccatcgagcccagccctgaccaac[132 bp omitted]aaccctgtctctactaaaaatacaaaaaaattagccgggtgtggtggggggcacctgtagtcccagctactcaggaggctgaggcaggagaatcacttgaacctgggaggaggcggagcttgcagtgagccgagatcgagccactgcactccagcctgggcgacagagtgagactccgtctcaaaaataaaaataaaaataaataaataaaattagccggaagtggccgagtgcggtggctcttccacagcagccagagggcgcctgtgaggctgactgggggtgtccctgctctgcccacagccctccatggctcccatttccctctgggtagaagcccaagtcctccgtgcagcccacaaggctctgcccagtcccctctctcctctccctcctctgtctactctccctcctccctgtctccccctcctcctctgcccagtcccctctctcctctccctcctccctctctcctctccctcctccctccctatctccccctcctcctctacccagtcccctctctcctctccctcctccctatctccccctcctcctctacccagtcccctctctcctctccctcctccctttctccccctcctcctctacccagtcccctctctcctctccctcctccctgtctccccctcctcctctgcccagtcccctctcctctccttcctccctgtctccccctccctcctccctgtctccccctcctcctctgcccagtcccctctctcctctccctcctccctgtctctccctcctcctctgcccagtcccctctcctctccttcctccctgtctccccctccctcctccctgtctccccctcctcctctgcccagtcccctctctcctctccctcttccctgtctccccctctgcccagtcccctctctcctctccctcctccctgtctccccctcctctgcccagtcccctctctactctccctcctccctgtctccccccttcctctgctccagccacacgggcctcctccctgttcctccaacttgccaggcggggtcctgccccagggcctttgcctccccaggtgaggtccggccccagggcctttgcacggccatgtcctctgcctggtttcccttccctaggtacccactgggttcatttcttcacttctttcaaggctttggtgaacgctcccctcatcacacagctgttgctcagtaaatatggcagaataaatagctgggcagggctcagtggctcatgcctgtgatcctagcacttctggaggctgaggcaggaggctcacttgagctcaggagttggagactagcctggccaacgtagagagactccatctctacttagggtgaccaggggagagaacaaaatcatgggctcattttttttttttttttgaaatggagtcttgctctgtcgcacaggctagagtgcagtggtgagatctcggctcactgcaacctccacctcctgggttcaagcaattctcctgcttcagcctcctgagtagctgggattacaggcacatgccaccacacccggctaattttgtatttttagtagagacagagtttcgccatgttggccagggtggtctcgaactcctgactgcaggtgatctgcccgcctcaccctcccaaagtgctgggattacaggtgtgagtcactgcacccagcaaaaaatgtttattattcccatttcacagaccagcaaactgaggcccagagggagccgcctgaggaaactggattgcgcagctgatggagtctcaaccagagaaggggcccgtggggcctagattcagacttccggctgtgcaggcaagcaggagggccccccagtcagggtccccaggacaccaaccccaagccaaatgaggccaccagaggctgtgcccagccccagtcccgcacggggcaggtgtggagcaaatgctggcgggatagagggatggagaagggggctgcctgggagtgaggggctgggtgccccacccacctggcctcagcctcctgccctatccgagaacagagctctggtttcctgcccggcagcccgtgaggagcagcgaggcatggccagctgggggccggacagtcctgaagagcttgaggactggctcctggctcctaaagcatagcgccggctctggggatctgccagggagagaccagctccagggcccctggatgcaggttagagctcaggctgtcccctgatggcctcggtgctatgggtgagtttctccacctctctgtgctcagcctctcaccggagagggggtgggtgatcctggcctgagtaggtgaccaaggcatcctcctctgtggctggtatttcccaacaccctcaataaattcacaggtggctcaggcctgtaatcccagcactttgggaggccaaggcaggcagatcacctgaggtgagcagtttgagaccagcctggccaacatggtgaaaccttgtctctactaaaaatacaaaaattagggccgggtgccatggcacatgcctgtagtcccagctactcgggaggctgaggcaggagaatcgcttgaacccgggaggcggaggttgcagtgagccaagattgtaccacttcactccagcctcagcaataagagcaaaactccatctcaaaacaaaataaaaaataagggcgcagtggctcatgcctgtaatcccaacactttgggaggccaaggcaggcggatcacaaggtcaggagattgagaccatcctgaccaacatggtgaaacctcgtctctactaaaatacaaaaaattagctgggcatggtgacgggcgcctgtaatcccagctactcaggaggctgaggcaggggaatcgcttgaacctgggaggcagaggttgcagtgagccgagatcctgccactgcactccagcctgggtgacagagcgagactccatctcaaaaaaaaaaaaaaaaacaaaaacaaattggtttgtttattttcctgttgatttgtgggagttctttatatattctggacctgagtccttgattacattatgcactgctagctagtaccttctcccagtctggcactttccttttgagtcttcttctttttttttttttttttttttttttctgaggcgcctgccaccacacccggctaatttttgtatttttagtag[143 bp omitted]caaactcatttgttcaaaataaaatgcaatttttttttttttagatggagtctcactctatcacccaggttagaatgcagtgggacaatctctcccaggctcaagcgtctcttctgcctcggcctcctgagtagctgggattacaggtgggtgccaccacgcccagctaattttgtgtatgtttagtagagaccaggtttcaccatgttggccaggctggtcttgaactcctaacttcgagatccgcctgccttggcatcccaaagttctgggattacaggcatgagccactgtgcctggccatgttaggatatttctttttttcttttcttttcttttctttttttttttttttgagagtctcgctctgtcacccaggctggagtgcagcggagccatctcggctcactacaagctccgcctcccaggttcatgccatctcctgcctc[224 bp omitted]aaccctcaatttgaggttgcaaaccctgtttcctgctaagccagacagatggtgctggagatggggaggccatggtttatgttttgtccactctgggtgctgcctggacaggtgactcatgcatgtggcggagcagtccagagtgaggactgtacccctacagacactcccccagaccatgctggtggcctgagctgggggctgcccaagtcccctccccgggatccacttctggggcctcccaagccttccctggggtcagtgagtgctggaagggcagccagcagtgtgtgtccacgggggggggcgggtcaccacttatctgggcattaaatatttgggggggtctcaaaataatggaaaacagggggccagaagtggtggctcatgcctgtaatcccaacactttgggaggccgcagtgggaagatcgcctgaggtaaggagttcaagatcagcctgggaaacatagcaaaaccctgtaatgaaaaacccaaaaattagcccggcgtggtggcaggtgcctgtgatcccagctactcgggaggccgaggcgggaggactgtttgagcccaggaggttgaggctgcagtgagctatgattgcaccactgctctccagcctggacaacagaacgacccactttctcaaataaataaataaataaatacgctgaggccaggcgcggtggctcacgcctgtcatcccagcactttgggaggccgaggtgggcggatcacgaggtcaggagattgagaccatcctggctaacatggtgaaacccccgtctctactaaaaatacaaaaattagccaggcgtggttgcgggcacctgtagtcccagctactcgggaggctgaggctggagaatctcttgaacccgggaggctaaggttgcagtgagcccgagatcacaccactgcactccagcctgggtgacagagtgagactctgcctcaaaataaataaataaataaatattaaaataaatagggcc[178 bp omitted]gaggcaggagaatggtgtgaacccgggaggcggagcttgcagtgagccgagatcgcgccactgccctgcagcctgggggacacagcgagactccgtctcaaaataaataaataaataaataaataaataaaaataaaataaaataaaataaattaattaattaaaatagagatgagatctgcctctgccgcccaggctggagtgcagtggcgtgatcatagctcaccgcagcttccaactcccgggctccagcaatcacaggacaaacctcccgcccggccctgcagccaggtgctcacaccagccctatttataacaggaatccatggaaatttctggccccaccaagctgctgtcatgaataagtcatcgtccggatcaatgattccacccagggagcatctgcaagtttccacctcgttctccctgggccccggacagcctggctgggacgtcagagctaccagtcaggctgcggaaacagcctgggggttcctctgtgaccaaaccattccacgccgtggtctctacccagagaaaggaaaacacaggtccatacgcgtgttcgaggcggcatgattc[158 bp omitted]ccgggcatggtggcaggtgcctgtaatcccagctactcgggaggctgaagcaggagaattgctctagccagaagggtggaggttgcagtgagccaagattgtgctgctgcactcagcctgggagtcagagcgagcaagactccgtctttaaaaaaaaaaaaaaaaagaaaaattcagccgggcgcggtggctcacacctgtaatcccagcactttgggaggct[133 bp omitted]tgaggcaggagaatggcgtgaacccaggaggcagagtttgcagtgagctgagattgcaccactgcactccagcctgggcaacagagcgagactctgtctcaaaaaagtaaaaaaaaaataaaatagatgtatataaaatatataaataaatatatataaatatatatataaatatattttttcttttttttttggatggagttttgctcttgtagcccaggctgggtgcaatggcgtgatctcggctcactgcaacctctgtctctcgggttcaagcaattctcctgcctcagcctcccaagtagctgggactacaggcgcccgccaccacacccagctaatttttatatttttagtagagacggggtttcaccgt[138 bp omitted]tccttttagccccagataacattccattctcgatgtttatctgctcgcctgccgaaggacgttttggtggcttccagggctgggctgttatgaatagcagagctgcaggccgggggcggtggctcacgcctgtaatcccagcagttcaggaggccaaggtgggagggttgcttgaggccaggcaatcgagaccagcttgggcaacacagcaagaccccaatctctaaaaaacatacaaaaattagccaggcatgatggtgcacacctgtggtcccaatggttccagccactcaggaggctgaggtgggagaatcacttgagcccaggaggtcgaggctgcagtgggctatgactgcaccattgcacctcagcctggacaggaggacaagaccttgtctcaaaaaaaaattttttttttgagagggagtctcactctgtcacccagggtagagtgcaatggtgagatctcggctcactgcaacctccacctcccgggttcaagcgatcctcctgcttcagcctccagggtatctgggattacaggcgcctgccaccacgcccagctaatttttgtatttttagtagagatagggttttgccatgttggccaggctggtctcaaactcctgacctcaagtgatctgcctgcctcagcctctcaaagtgccgggattacaggcgtgagccaccatgc[134 bp omitted]tgtctctgctaaaaacacaaaaattagctgggcgtggtggcttgtgcctgtaatctcagctacttgggaggctgaggcaggagaagcgcttgaacccaggagccggaggttgcagtgagtcgagattgtgccactgtgctccagcctgggcaacagagcgagagttcgaatcaaaacaaacaaaaaaagccacaggcggccacacatagaccgtcactgacctcctggagcttctcttctcagggaaaggaacttccagactcagaaaactggggcaggaaacatccaggccagtttttccagcccaccggatctcaggcagcttccaggaggattgcctgaactcgctgaaattgcccaattccctcctgggcacatggttttcagatgatgaacacacaccctgcaccggggctgaggcctcaccctggcgtttgaatcctgggccccgggtttagtccacaggaggagaagccacactggctgctgggagggaatgggaagcgggcagccgccgtggaaaacatggatcagtgcttcagaaagccagacagcggcgccgtctaaccccaccgtgcggctccgaggaatccaccccagataaccgaacacagcggctctcaataaacatgttcacagcagcatgagccacgggagccaggggtggacggaaacagtggcacgagccacaggagccaggcgtggaaggaaacagtggcacgagttacgagagccaagcgtggaaggaaacagcagcatgattcacgggagccaggcatggacggagtccacaggagccaggcgtggaaggaaacagtggcacgattcacgggagccaggcgtggatggaaacggagaggagcagagagcaaggctctgacgccagccacagcgcagatgcaccctgaggatgtagggctcagacggatgcccgacacgaaaggccacacagcgtgtgatcccatttccatgaaatgtccagggccag[138 bp omitted]tggcgggcgcctgtagtcgcagctactcaggaggctgaggcaggagaatggtgtgaacccaggaggcgcagcttgcagtgagccgagatcgcgccactggattctagcctgggcgacagagcgagactccatctcagaaaaaaaaaaaagaaaagaaaagaaaaaggaaaaacagaattaagcattgtagtgaataattcagtgggatttggtgccttcacggtgctgtgctgctgtcacctctaattccaggatattcccatcatcctttgtggttggggcatcatctgtcactccccatcccctccccatccctgagaatccatgcatccccttcctgtctctgtggcttggtctgtctgtcctggacatttctttttttctttttgttgtt[137 bp omitted]tgcctcagcctcccgagtagctgggactacaggcgcccgccaccacacccggctaattttttgtatttttagtagagatggggtt[132 bp omitted]cttgctatgttgccacgctggaatttttttttttgaggtctctctgtgttgcccaggctggagtgcagcggcacgatcttgacccaccaaaacttctgcctccctgcttcaagcgattctcccacctcagcctctggagtagctgggattacaggtgcccgccaccacacccggctaattttgtatttttagtagagatggggtttcatcatgttggtcggggtggtcttgaactcctgacctcaagtgatccgcccgcctcgccctcccaaagtgctgggatgacaggcgtgagccaccgtgcccggctgcccacactggaattctatgttataggaacttcatctcactgaaagaaaaaggggactcctggatgggtcctgaatttagacatttatttgttcatgaaacaaacgctgatggggccgttgcacacccaggtctgcactggccgccctgtggggccccggaggggcgggggcagggagaggccgcctgagaggcagtggcccgggtggaggacccagggctgggcctggcgatgctccgactgcagcttccggagaacaatctcaggtccacaatgtggagacgttggcagatgctcctgctgaggaccgacagacatcatccccgcttcatcctgctttttcctcccatgaggaggtcaaagtcacaccgtggggccaggcccggtggctcatgcctgtaatctcagtactttgggaggccaaggtgggcagactgcctggacccaggagttcaagaccagcctgggcaacatggtgaaatcccatctctactaaaatacagaaaattagctgggcgtggctgggcatggtg[131 bp omitted]ggcgtggtggcaggcgcctgtggtcccagctactcaggaggctgaggcaggagaatggcctgaacccgagaggcggagtttgcagtgagctgagatcacgccactgcactccagcctgggcgaaagagtgaaactccgtctcaaaaaataaaaagaaaagaaaagaaaagaaaagaaaattaggccggtgtggtggcacacacctgtagtcccagctgctcgggaggctgaggcaagagaatcgcttgaacccgggaggcgagggttgcagtgagccgagatcgcgccactgcaagactccgtctcagaaaaacaaagtcgcacaggagagtcacgtccaccccctgggccaccggacagtcgccacagaccaggcagctgaatccccgctctacagacaaccccatcaaggctggggcagtgagacgctctgaaggccacaggcccccaggatcccaccccgtccgtctctccctccctgctgtccctctgtgagccacaccctgcggctgtcagcggcagtgatgggggctgcaggggctggggacagagggggatgagtttccagccaggcggcctgggagggtagctttaatccccacctcggttttgtcttagaagcagttgcatggctgtgctccaggccgtccagggttcaggctgagccaccgtctaggtctagacgtcagtgtccatcaggacctggcgtgccctgcaagcagacatgtgctccttcgacctccgtcaaccctggagatgaagcagggaaggggccctggctggaggcttggacatccatccggaggggcggagtggcctcgaggcggtgtgtgagtccccggggaagatgcaggggacgctgggtggccggtggcacgagtgaggctcggggtcccgcagccccccgtggtgtgggtgcctgagttggggggtcctcgaggaggacaagggagggaactgaagggggccaggacacccggtagcttggctgccgggggctctgtgatatgctaagtccctcctgctcaccactaaacccaagaggaaaaggaattcctggcagagtccaatttaaagtcaacaaacaaacaatgtgggaaggagagaaggaatcccaggaatgtgggcgaggtcctcctcccgccggggccaccctggacccggcgagaaatcgaaggtcccccaaggacccacgtccaggagccaacagcctctctgtgcaaaccagacaaccctgcaggaactgtgcttgaagaaaccgtggaaactgcccccaaccctcccgtctctatttctttctctgttttattatctcattcttggctgtgaggtaaacaggagaaaatgagaaggtggttctggaggacccgaccgaatttgctttcgtgacagggtcaagcgccctttcctcgccggccgcagccctcaccaaaggggatttgggggcctccggacaggggtcctgaaggttttgaattgttcaatctctgggggtacaggaacccctgcaggaggtttcaaaggcaagagtttcgcagagagaaaaaaaccatgaactttgcaggttggtggcggaatctggtgatttaagaaaacgtgtttaagcctcggccgggccgcgcctgggctgtctgcggtgctcttccggaattctctacaatatctggaagtgaccaagaaaattccagaacccggaggctgcgccgtggagataaacatgggcacctgggtatgtttgtttttattgttaggacctattttatcacaagcaaaaaaaaggaagctgcccagaaatccaggggtgatggatagaaggcgatggggcctgcagtggcccaacggattctagaattttcctctaggaagatgcccgggaattttaaccctgttggctcgacccagaagctcggggtggcagggaaaggatcactgtggccttccttccttccttccttccttcctggaatttcgctctgttgcccaggctggagcgcagtgacgtaatcatagtttgctgcggccctgaccccaatggcacaaatgagcctcctgcctcaatctcctaagtagctgggactacaggcatatgccactacgcccggctaaattttttttttttttttttttgagacagagtttccctcttgtcgcccaggctggagtgcagtgtcgcaacttcggctcaccacaacctccgcctcccaggtggaagcgattctcctgcctcagcctcccaagtagctgggattacaggcatgagccaccacgtctggctaatttttgcatttttagtagagacggggttt[141 bp omitted]ctgtgtcacccaggctggagtgcagtggcaagatcacatcccactgcagcctcgacctcctgggctcaagtgatcctcctgcctcagcctcctgagtagctgggaccacaggcatacgccagcacgcccagctaattaaaaaaaaaaaaaaaaaactttagcagccaggcacggtggctcactcttgtaatcccagcaatttgggaagctgaggcggacagatcactagaggtcaggagtttgagactatccctgtctctactaaaaatacaaaaattagccaggtgtggtggcgcacatgtaatcccagctactccggaggctgaggcaggacaatcacttgaacccgggaagcagaggttgcagtgaggtgagatcgtgcccctgggcgacagagggagaatccatctcaaaaaaaaaaaaaaaaaatttccggatggggtctcgccacgttgcccaggctggtcttgaactcctgagctcaagtgattctctcacctcgacatcccaggttggtggattacaggcgtgagccacagtgcctggccctggcttttcttcttgtttgtcaggctctgctgttgtgataggaaggcttgaggacttcaaaggggcggctggtgtgcggggttggggacgatggcagggacaggagggaggtgctgttggcatgtgtggaatgtggcattggcgctggatggacgggtctgtgtgcgctgactgcgtgtccgatgccagggcctgtgttccccctgcacgtccccaggaaggaactgctggaccagcagaatgaggggccaacgccaggggcagcactgcccggccacagaggactgtggccccacagatgacaccctcagctaccagctcctgcatctggaagatgaccaggaggaggaaggacggtctgcaagtgttcaaagtgatgtttccaggccgggcgcgcttgtaataccagcatttgggaggctgaggcaggcggatcacctgaggtcgggagttcgagaccagcctgaccaacgtggagaaaccccgtctctactaaaaatacaaaattagccaggcgtggtggcgcagctactcgggaggctgaggcaggagaatcgcttgaacccgggaggcggaggttgcggtgagctgagattgtgccattgcactccagcctgggcaacaagagtgaaactccgtctgaaaaaaaaaaaacctctataacatccaaaatactaaccacttgttacctctagattgtttggggatgttagatttctcctttgttgccagctcttttatttttatttatttatttattattattattattattattattattattattattttgagatggagtcttgttctgttgcccaggatggagtgcagtggtgtgatctcggctcactgcaacctccgcctcctgggtttgagcaattctcctgcctcagcctcccgagtagctgggactacacgcgtgtgccaccacgccaggctaatttttgtatttttagtagagacggggttttgccatgttggccaggatggtcaggaactccccaactcttatttttaaatgttgggccacacaagtctgggaaatgttagttttcaaacacatcagggaataaatggatacaaaagtcttgaggaccacttaagaaatgaacaatagcagatgtgtaacagttatactacgctgctaccttgtaaaacattttagaaacatctgtttccagccgggcctggtggctcacgcctgtgataccagcactttgggaggctgaggtgggcagatcatgaggtcaggagttcgagaccagcctggccaacctagtgaaccctcatctctactaaaactacaaaaaattagccaggtgtggtggcgggcgcctgtaatcccagctacttgggaggctgaggcaggagaatcgcttgaacctgggaggcggaggttgcagtgagccaagattgcaccactgctctccagcctggcaacaaaggaagactccatctcaaaaaaaaaaaagaataaaaagaatacaaaaagaaaaaaaaaacatctgtatcatccttgtagattctggggtttggaaacaggctttgaaaaaagtcctgaaacaggccgggcgccgtg[319 bp omitted]aatggagcaaattttgaacagcttgaatacctgagacaggccaggggtgcggggcaggctcattttatattcttcacggttgtgtgaatttcttgcaattatatgtagcaattttttcaccaggatttagtatattagcatgtttcgggctgggcacggtggctcacgcctgtaatcccaacactttgggaggccgaggcaggtggatcactaggtcaggagtttgagaccatcctggccaacatggagacacctcatctctactaaaaatacaaaaattatctgggcgtggcggtgggcgcctgtaatcccagctacttgtgaggctgaagcaggagaatcgcttgaactcgggaagcggaggttgcagtgagctgaaatcgcaccactgcactccagcctgggcaacagggcgagattccgtctcaaaaaaaaaagaagcatgtttcctagcaagccaattcagaataaaaagaaaacaaaggagaaaatataatcccaataaaatatattgaaataaatatgtacacacatatatatatgtgagtttatgctttgttttgttttgttttctggaagacggagtctcgctctgtcacccagactggagtgcaatggcgtgatctcagctcactgcaacctctgcctccctggttcaagggattctcttg[134 bp omitted]ctgctatttatttattctgggttttttttattcttttttgttgttgttttcattttatctttcttttcctatttatttagagacagggtttcgccatgttgcccaggctggtctgaactcccggactcaagccatctgcccatgccggcctcccagtgtgctgggattacaggaggaagccactgtgaccagcctgaaagtgttcatttttaaatttttaatagagatggggtctcactatgtcacccaggctggtccgaaactcctgggctcaaaccatccgcccacctcggcctcccaaagtgctgggatcacaggtgggagccacgcgcccggccccaaagccctccttgcacaagcacctgagccgccatggcccacaggcccatcaaaaccagagcaaactggtacctgtgatacagcctccactccagccccagggcccagccccaggccacccgagccggctgtgggtgacctgagaccaagtgtcgtttcctgctataaactattgatgcctgagcagtcacctccaggagctccgggcttggctacggtgtcctgggttccctgtaatgaagcccggggcagctgcggcctggagggcgtctgctccgcctccatcctgggcccgcctggggctcttttccttctaggcctggttccctccaaaattagcttcctatcgggatcccacatcccctcacaatggaggcctgacctctggggagacacaatgtcagggtcactgtgaggtttttatttatgtacttttatttttatttatttgataccgagtctcactgtgttgtccaggctggactgcattagtgtgatcctggctcactgcaacctctgcctctcgggctcaagcgattctcctgcctc[135 bp omitted]agcctcccaaagtgctgggatgacaggcgtgaaccaccgcgcccggcctcgatttactcattttttttgagagagagagagagtctcactctgtcacccaggctggagtgcagtggcgtgatctcagctcactgcaacctccgcctcttgggttcaaataataattctcctgcctcagcctcccgagtagctgggattacatgtgtatgctaccacacccagctaatttttatatctttggtagagacaggcttttgccctgttggccaggctggtctcgaactcctgacctcagggcatccacccgcctcagtcacccaacgtgctgggatcacaggcgtgagccaccgcgcctggcctgactttattattgttttacaaagagcagaccttccacctgccatggataaaacgccgagttctagaggacactggagacagagtgttccccagaacaaggcctgggcgcagcagcctgcagggctggggtctccactcccgggggagcgtgcagcggggcctgccatccctctgtgcccccgccccacccccactctgcaggccgctgaccctgtggtcgggctggtgagcagatggctgctggatcactgacagcccggctcacgttccctctccctatggagacatcttccttttaataaattttgcaaggccgtggaggggggccagcgctctggcccacgtctgtctcccatccccatcaccacacgaggccccagcacgcctggctggcctaagtccccgcaggatgaatgggcttccggggcctgctgggaccaggtaagcaggctgtgcggcttaaaacaacacaaatacactctcgtctctggaggccggaagtctgaagtgaaggtgtgcaaggtgccaggcgagtaccctcccggcctcttccagctcctggtgccgacagccacctctgaccctcctggacttgcggccgcttccctcccaattctgcctctgctgccccacggcggtctcctctgcatctgtgtccaaatttcccttgtctcccgaagtcgcctgtcactgcggtggtgcccgccctaatgatctcatcctaactaattacatctgcagaaaccctatttccacataaggtcccatttgtaggtgcctggggttcacgcaaagacagatctttgagggaactcaattcaccccaccccggggagtttgcctttgtggccggcccttccccctcagatcaaattctgcctcctcagcgaggccttcctgaccctcccgggcccttcctgcctttctctctggctgcggctgtttcctgcggggctggctgcagctcccggcggcgccctgtcctgtacctgtttcatgtccatcgtcggcaacccctggcttctaacacagctcattgcccgcaggacctcccagcaggagcagggacccagtaggccctgcgtctccgtccgaaccacaagctgctgtgggtggtcacttgacagaaagacccctgcccccccttccttatttgtttatttgctttttctgttgctttagagactggattttgccctgtcatccaggctggagtgcagtggcgaaatctcggttcactgcagcctccatctcctgggctctggtgagactacggccttagcctcctgaatagctgagaccacaggcgtgcaccaccacgcccagctgattctttgacttttgtttatacagggttttgccatgttgcccagggtggtttcaaagtcctggcctcaagcaatcctcgtgcctcgccctcccgaagtgatgggattataggcatgaacaactacccacttcactccatcctttcctttttttttttttttgagacagagtcttactctgtcaccaggctggagtgcaatggtgcgatctcagctcactgcaacctccgcctcccaggttcaagcgattctcctgcctcagcctcccgagtagctgggattacaggcatgcaccaccacacctggctaattttgtatttttagtagagaaagggtttcaccatgttggtcaggctggtcttgaactcccgacctcaggtgatccacccacctcagcctcccaaactgctgggattacaggcatgagccaccacacccggccgagacagggttttcaggcgatctgcctgcctcgggctcccgaagtgctaggattacaggcgtgagccactgggcctggctttatttaattttttgagatgggatctcactctgtggcccaggatggagtgcagtggtgggatcccagctaactacagccttgaactcctggcctcaagggatcctcccgcctgggtttcccaaagggctgggaatgacaggtgtgagcccccacccccctggcctggatatttcatagaaatgggatcacacggggccaggcgcggtggctcacgcctgtcatcctagcactttgggaggccgaggcgggcggatcacctgaggtcaggagtttgagaccagcctggccaacatggtgaaaccccatctctactaaaaatacaaaaattagctgggcttggtggtgggtgcctgcaatctcagctccttgggactctgaggcaggagaattgattgaaccaggaggcagaggttgcagtgaactgagatcgtgccattgcactccagcctgggcagcaagagccaaactctgtctcgaaaaaataaaataaatgggatcacacgctgtgtgtccttctgtgtctggcgtctctcacggagcgtgacgtccttaaggtgcatccgcgctgtggcctgggtcagagcctggatccttttcacgctgagttgtgttccgcggtggacggccggcactgggttggtcttttcttccactaacgggaatttgggctgtttccacatgtggcctccgtgaataacactacgatgaacgttcatgtacgcgtttctgtgtggacttgtgtttccccttctctcaggggcatgaataggaggagaattgcggggttcctgagggccggcccccagtgctggcacatccccaagccaagccccacccctcttttttttttttgagacagagtcttgctccgtcacccatgctagagtgcaatggccccatctcggctcactgcaacctccgcctcctgagttcaagcaattctcctgcctcagtctcccgaggagctgaggttacaggcacccaccaccatgcccagataatttttgtttttttagtgggagacggggtttccccatgttggccaggctgatcttgaactcctgatctcagggatccacgcacctcagcaccctctttggaagttcctagcaagttctctgcctgagttcagacccacagggcctcttaggggacgggggagggtcagggcccagctctagctgaactcccccggggggaggggggaggggggaggctcaggacccagctctaggggggattgaggaggatcagggcccagctctagctgaactcccctgggggtagggaggagggtcagggcccagctccagctgaactcccctgggtggggtggggaaagagggtcaggctggggaggggagcacagaatggcggggtgccaggcctgggggagaggcggatggggtggggaaggatgggtctgggcagataacgctgtggccttttcctgttggcctgagggcccagggtgggggtggggagaggctggtctccctgaggtctgggcatagggaggtgtcctgggatgagaagactcttgagaagtgactttgataattcgggggcagatccttgggcccaccaccccttgcagggacaggggtccttcttggggtgggggatgaacagagactggagagggtgggggagaaaggagttgaggggctaatttacaggacctctcaggccgggtgtggcagctcacacctgtcatcccagcacactgggcagctgaggcaggaggaccccttgagcccaggagtttgagaccagcctgggtaacacggtgagattctgtgtctacaaaacattttttaaaatgagccaggcgtggtggaactacttgcttatagccccagctaccgagaggctgaggcgggaggatcacctgagctggggaggttggggctgtggggagccgagactgtgcctctgcactccagcctgggcaacagagtgagaccctgcctcaaaaaaataaataaacaaaaaataaataaagcccccattccctttaggatctctacttcctataccaacccactgtcccagcttggaggggcgggaccagcctcgagccgcagttgattcccagagcacagagcacaggacggaagtggttctgcatggggtatagtgaggccagggaatagcaatgcattcctgtccgtgagtcctggccatcaggccttggggtggcctcaccgaacccccactccaagctccgttcaacagaaatccaggaaatgggccggagaggctgggagaccacccaggagaccagcccgaggccgcgccctggatccctgagccctcacttttgtaattaagataataaacctgtgctggctgtgcgggcacacacctgtcatcccagcactttgggagaccaaggcgggcagatcacctgaggtcaggagttcgagaccagcctggccaacacagtgaaaccccatctctactaaaaatacaaaaattaggctgggtgtggtggctcacaggtggattacagggtggcctgtaatcccagcactttgggaggccaaggagggcagatcacaaggtcaagagatcgagaccatcctggccaacatgctgaaaccccgtctctattaaaagtataaaaattagctgggcatggtggtgggcgcctgtagtcccagctactcgggaggctgaggcaggagactcgcttgaacccaggaggcggaggttgcagtgagctgagatcacgccattgcactccagcctgggcgacagagcgagacgccgtctcagaaaaagaaaaaaataaatcaaataaaaaaataagaataaaaatacaaaaattagctaggcgtggtggcaggcacctgtaatcccaactactcaggaggctgacgcagaagaatcacttgaacccgggaggcagaggttgcagtgagccaagattgcgccactgtactccagcctgggcaatagagtgaggttccatcccccccaaaaaaaaaacaaaaaaaaaggaaaaggaaaaataaatctatggaactgctcatggggaggagggacggcctggccctgccactcatgttgacgaagaagtaaactgaggcacggcccttccctcccccatcagaactgaaaggtgtctgaggccccagcaggccctctgcatgagattcggtggctctgagggcctcagatgtcctcactcccccccccgtttctcctgccaggctcagagtatcattttcaaaatggtaaccagcaaaccaacgtgattctcgcacaaaggcaaggtgagcctgttcctcgctcaccctgaatcattcatgaaggaggcagctggcctgcgggctgggatgggagacaggagaggagaaaagacagaggctgggccctgctcgctaaataaatcaggtgcccacgggagcccctgggcgtcttcccgcgctggcgttctgcatatgacagctgacctgtaaattgctgggccctcagccatggttactgtcaggccagcccaggaaggacactggtttcaggtgacctgggtgaggtggaggcggtggggggggttcctgggaccaggccgccattgcaaaaacaaacggcctgcttgtacctgctatcgccctctaagcttcaggtggtgggtggggctgaggggctgagaggtggccccaaagaaagacaaccacatcctaaaccctggaacccgtgaacaaggcttcatttggaacaccagtctttgaaggtaccattaagtgtcttgagatgagatcatcctggagtctgcaggtagaccctaaattccgcgacatacattttattttttatttttacttttttttttgagatagcgtgtcactctgttgcccaggctggagtacagtggcgtaatctaggctcactgcaacctccgcctcccgcgttcaagtgattctcccgcctcagtctcccgagtagctgggattacaggagcaaaccaccacgcccggcaaatttttgtatttttagtggaaacgggctttcaccatgttggccaggatagtctcaggctcttcaccttgtgatccgcctgcctcggccttccaaagtgctgggatgacaggtgtttattttcgtttttgttttttagagacagagtttcactcctgttgcccaggctggagtgcaatggcgcaatctcggctcactgcaacctccgcctcccgggttcaagtgattctcttgcctcagcctcccaaggagctgggattatagggcatgcaccaccacgcctggctaatttttgtatttttggtggagaggaggtttctccatgttggccaggctggtctcgaactctgacctcaggtgatccactcacctcggcctgccagagtgctgggattacaggtgtgagccattgcacccggccagacactgtcttaaaaaaataaaaataaaaaaaggtactggacaggtggctggtcatgtggggcttgcggggtaagggatggccttgggtttatactttgagcaagacaggaggcctggcggggccacgatcagaagtgggttttaacacgattccgaagggttagactggtgcttggaacctggtggtctctactgctgccagctgccactcagacccccggccgcccctgcctgtctgctttcagggcggggcccatcccaggcactccgcgaacagacagaagcggctggttctggtggtgtgaggatgggggtctccaggggagcaaatccacagtaacacactgggcttctcccagatccaccggacattcctgatgagtgaccctggctgcagatggctcttggtgagtctccgttgaccgggtggttcgggccaaaggaccttgccgtgcgatgcctccatggagctcggcggccacccctaatccgggctggaatcctctggcaccagacgcccggcggggctccaaggctcctgggcccacgccaggccccggcctgaaacgcagcactgctggaataaaacacgccagagaagcagggcgctaggctcgcctggatttggggaaacgagaattgtcatgtcttctccctccgtaggttggtgttaatgaaaaacccccttttcagcatggactaaatcccgctaattctatttagggagcagtgtctactccgggccgggaactgctccggtttccaaccgcagcctcccgtgagggtcccagtgtggagggccggggtcatcccctcactctgggatggctcccaacccgctgacctggcctccccgtcaggcaccctcacagctctgtcagactcttcatgtgatcagcgctcctgggaacattagtttagggtgttttctgctgctgggatggtggcccgggagggaccctcctggtgaccctgctgggcctggccctcagtttccccagccgtaggctggcagcctcgaactgtacgagctccaggccacagtttccccagctgtaggtcagtgggccagggactgtagggggctcgggcctcagtttccccagctgtaggcgggtggcttgggcctcagtttccccacctgtaggcgggcggccttggattgtatggagcccgggcctcagtttctccagctgtaggcggatggccgtggactgtgtgtggcctgggcctcagtttcccccgctgtaggcagatggccgtggactgtgtgtggctttggcctcagtttccccagctgtaggcggatggccgtggactgtgtgtggcccggacctcagcttccccagctttaggcggttggccgcggactgtgcaaagtccaggcctcagtttccccagctgtaagcgggcggccgcccactgtacaaggtccaggcctcagtttccccagctgtaggtgagaggccgcggactgtacaaggtccaggcctcagtttccccagctgtaggcgggcggccaaggactgcaaggtccaggcctcagtttccccacctgtaggcgggcggccgcggactgtacaaggtccaggcctcagtttccccagctgtaggtgagaggccgcggactgtacaaggtccaggcctcagtttccccagctgtaggcgggcggccgcctactgtataaggtccaggcctcagtttccccagctgtaggcgggcggccgcggactgtacaaggtccaggcctcagttttcccagctgtaggcagccggccgcggactgtgcggggcccggacctcagtttccctatctccgcagtcgggattcgctgttccggggcgaacaaagaacggtcgggggtgaccccggatcatggcgcgcccgcagtatctgtggccactgtggaaacagccctggcgtgtccgggacgcgacgcggcctttccctccccgcgcgatcacccagatgtgagcgctcagtttgaatcggactttttggccatgtgcccacaaccaacatggagccctgagggtttcctgcccgactccaagatggcgatgcgactccctttgccctcacggcccaggcgggcgggtcctgcccacttgcaagatggcggcagcctgggcaaagcacgcttcccgccgcctgactcgccacgtacccactctcaagatggcgtctcccgcaaagccacgcgccagctgactggctcagacgccgtcacgtgatcccattttctccccctcccccgactacacaagccgtttccgccttcggccttgaggaataaccgcctcccccaataggcgcctgcgatttctctgggtcccgcccccgggcggccttctggccagtgggaggtgctggcgggggcccgcggggctctccccgccccctggctgcagcgggagccaatgggcagcgcgcgcgggggacgtgtgcgggcgtctccgccattttgtgagtctataactcggagccgttgggtcggttcctgctattccggcgcctccactccgtcccccgcgggtctgctctgtgtgccatggacgggtgagtcgcacgtcgccccgcgccccaccgccctccccgcgccgcagccctgcccccgccgccgcgccggcctccccggggccgatctcgccccctctcgggcgggagggggcggcgggctctccccttcctctccgcgtggcgggcgcgggtgcggggcgggtcaggggcttcccgggggtctggccgcgtccccatcccccgtccggcccgcttccggcccccgcgcgccccgtccctagcgcacgcggcctcccgcgcccctccccctccgcgcgcgtccccgcacttcgcctttgccccgcctcggcggcgcgcggcccttcccgcttcccgtccggccctcgcgcgcccggatggcccttcccgcctcccgtccgctcccctcgtgcgcctgcgtagcccgtcgcgcgtccccgttggccccagcgcgcgtgcgcggccgccatcgggggcgcgcgcctttcccgccgcccggactctgcccccggcgcagccccggaagcgcaggcggggctggggcggccgccgggagggaaagctggcgccggggcctcgccgcgggcccgagtctctgcgctccccgccctacccctgccccccgtgcgccccgggccgcggccaaggggtttcggtgatctcgggagagaagcggccgccccgagggtctgtcctccgccccggggccggaggggcctctccagggacccccgcgggcgccgtcatggggaggggccttcccggctctcgggccggggcagcctttccgggcggctttgctgggcgggcttcccttgggagaggtgggagccccctccagaaaggccgtgtcccgccgagcgcttcctgcgcgaggccctccctgggaataggaagcgggagaggctggagatgtttcgcattctttccgttttcctgagaagtttttcttgggttcagtcacttttaaaagtctgttaaacgtggtccgtgcagtctgtggtgtcagaagaggcgcagccctagagtgggtctggaccccttagcatgcgtgcgggcaggtgggtcctgcagacggcgagacgagggctccccgctctcggacccagcaccgcgggctcgggggccgcgcactcgcctcccggagtgaggcaggaggcccggaggctgcccttccgacggacgctccgagtcacttagggcctcgccgggagttgcagtggccgggagaagccgtggggagctcactgttgggtcaggacctggccggggctgaagggagggcctcggacagtccggctttctatccaccttccccccggggtgtcccgaggagggagagtcgggtcgggcggggctcgggttgatcagtaactgaggctgtgttctggtcggtctgttaatttttattgacggtttccacggccgcctcctgctctcctcggtggatcgggctccactctgctgagaggcaccctcttgggggcccacccctacccgggtggaagctctggcccaggcctgtgagtttgccagtttcagcctctccgaggcgtttccaacttactggaaagcacacagcagcccttgaaccctctcagcggcatctagcattcctcggggcttccgatgggggtgtctttgtcttggaacgtgtggggcctggtccagaggtggggcctggggtcctgctgggagggaggggcgccaaaggacaatggtggccccttttcaagttgcagtcaagtggacggctcacttccctgcccttctgagctttctctagcggggcctcgtgcagccagagggagccctgcggaggtggcagctgcagggacctacgggctctcctggcccggggacagctgggtgctcctgctgctgagtggccaccaggctaacgttgtctcctttctttctctctacagcattgtcccagatatagccgttggtacaaaggtaggcacttctcactttgcttctccgtgacgctcctctgaccttgtgccgaccccgggggccaccccccagcgctgttgcgttggctagagggcgcttttccattcctaaggggcactacccttggtctggaatctggagttgggcggtagggtttgaaccccgggctccagtgcccgtgagttttgggggcttgggtttgctggccgcccctcaggtctggaatctgagctgctcttcggttcttgctgtcagcagcgagggctctgtgtgccccaggcctgcctttggaacttctgcctctagaggctggaatcgtgccgttcagtgggaaacctcatgttgtggctgcctgggagactcttggttttgataggaaaagagccacctggctgtggaggggacctggatagaatccagcctatttgagtggctaggatgggcatttactggttgattttgacgttaagtttttttgtttttgtttttgttttttatttttgagatggagtcttgctttgtcaccaggctggagtgcagtggtgtgatcttggctcactgcaacctccacctctcaggttcaagcgattctcctgcctcaacctcctgagtagccgggattacaggtgcccaccaccatgcccagctaatttttgtattttttttttttttttttggtaaagatggggtttcgaacattgttggccaggctggtctggaacacaggtgatgcaccccccttggcctcccacagtgctgggattacagttgtgagccgccagacccggctgacattaagtatctttgatggcatctggttagaacagcagcaaactgtcaaaggtggtgtttggggcaagagaaaaatgaatgtgccacgtctctggggtgtgcgaatcttgcagccccatggagggtgaggccagggctcagcatgtgaggaaagggggtcagaacctggagaagaagaaggtcctggggaggcgattctcgagggagctgtagtcctcgcttagctggggtagttggttaatgattctgctggtcattgtgggttgagggggctcccgacttcagggcttgtgccccgagagcctcccgcagggcgagcccacagtggtggcgtcctgagccagcagccagttggtttctggtcagtcagcagtggtgcctgggccaggtttcggtttttcccaagtggactgctgtctttacgcgctgcctgccccgatcttcctggagataaaacctgtttgttcagtgtgggaggagggagaggtactttcatctgaagcatttgcaacaatccctagatgtgtctggcttgcaggcagtcgtctcttccctgcttctgtgggcctgctttccagctggagtggccctcagcttccatcgggtggtccttgagccctcctctgcagttcctagggggctcctgggctgggacgttgaagcccagccaggacttgaagcctgcgggagggattttgccacagggcagggttagggctcctgctgggtgcaggccctggtaggaggacggggtagtaccctgacccagatgataccccccctcccccccaccaccagggagccctcagctgacctgggcccacacctggctacgctgtcctttagcccaggacagagcaagctcttgttcagtgtggggttaaagacacctaggaactgtgctgtagggccccagctgcagactggaagtcctggggcgtttcctgtcaatctgtgtgcttcaggacaggtgccctgaagggaccctcctggggtacctggcagctgctgtgaaggcagtggaggcgctaggcccagctcgtgtctcctggttgctgccctgtggagcctcggagcctccaggtgtcccttccgttctgctggggcgccgttgagctgagccaagccggcctgtgccgcctgggcaggcatggagtttgctgccgcagacagttgtgggcaatgccaggccacttgcccatgggaatgagattagggcttcaggcaggcggccaagaggaccgctcagaggaagcggccccgcccaccactccagtcaaagacagggtccaagatgccctttttaaggtttgtgcagccagcacatgggagccgcatgggcgcttggccactctccagcttgggggaggaccagccctggtgtcctggacggggtcggctcctgggctcccccagcctctgagctggaggggagagcagacaggaagcgacttcctgtgggaggcgaaggttggaggccctgcgtctcaggtgcacccatcctcccttcctcccgtcctcccttcctccggtcctggcactgctgtgttttctgatcgcgtggtttccacctgaggcggctggctctgacccctttcccctgggcctgcgcagccccgccttgtgctcatagggggccccagactctgaaagcgagaggactcgagggtctgttttcagtatttggcttcatctgtgtccggccggaacctcagggccgccgtgacactggacactgttcattctctgaccctaaagtcttggggactgaacaggtgccatttgggtgggcgccgggcctgtggaccctgagtgattcctggttccggcccttgtggctgctcgattgcttgtttggtgacgccctgagtgcttgtgggattggtgggagactcagggctgcagttagaggtctcattggcaagggccagtccctgttccccatcctccttgagcaggtgccggagtctcccgaggctcttgccgtccgcgtcgggaggaggcagctgtggggctttggaggctcgggcagtcttccttccaggaagctcttgagccagggccagggcaggagtggagctgaacgtgggtggaggggaggcggccttaagagaagaccaagcgcaggctcggggaggccagcgttggtgggggctctttggccaggtgtgggggcagctccttgaccaggcatgggggtgtgtggagctgggggttgtctgaggggggacagggtgtgatatccactggttctttctgatgcgatggccctgggcccttcagcaggtgggggcaggctcttggcctcaatcctgatacgggagatggaggctcctttgttccctgggatggccctgtcctggggggcctgggcgttgctgccctcagcgcctgcagaggctcgctttgcagaccaagcgcctgtgctccaaggtcctcagacccgagctttgttttctgtgtaactaagggccgtaaccaacgtctcctccaatttcactctttgaataaacgtgtgtcttcaatccttgcagcgggggggatgtctgccgtcctgagcctaggatcagtctagtgcaattcttagaagttgatccaattacatagaaataaccagtgaatagattgtttctggagagaaaatggacaggtcagaagtgatggagccgctgtggagctcccccggccctagtcacggccgcgataccagcggatcactgggcgggaggccgtgtctctagtcctcagtctcgcgtgtgcagagacggaggtcgggtttcttttccgggctggaaaacaggagaggaggggctcctgcgagagtgagggaggcagcgctataatttggttctcttgcgaggccaccagaagtgaggacggctgcctgggccctgccgtgtgctgctgggggggctggctccatggagggggtcctctgccctgctggctggtggctgaggccccaggcctgtgcccagggccgctggcagcacagtgaggccacgtccacagcagagttggccgtggagatagtgtacgtggtgccctccgtagctgagagcctcccagccccacactggctgagtacccagggcttccagaatttggaaaaaggagcagtgttttggtcgtggagctgtggggtgccgtgcgcgtccatgggctgggtctgcgctcaggctgccctgccgtggaagtgtgggtgtgggtatgggttgggggtctgggaccccaggcagcccaagtgggagcagggccggccggtggggaagggaggctctggcctggtgggaagtgcagctccgcgttgtcccttctcttgcagcggggatctgacgagcttttctctacttgtgtcactaacggaccgtttatcatgagcagcaactcggcttctgcaggtaaggccgggactcggcccagggcaagacccgtgggtgtctttccctggaacaacgttacgttcttgttctgggactctactttccatctccaactgcaggggcccatggtccacgctacagacccaggtccaagttctcgctgcagagaatttccagggaggcgctggatggatggtccaggctggcacttggacctgtgggcgggttgtcaggagctgtcgggagcaggggtcctgactgtgcaggtcttggcctctcgcgctgctggttcacatgcaccctcctggggctcagggttggtctccgtagcaggcagggctctagggggatagcagggaccttcctctgtgggctcctgcgagttggtgcctgcatctcatggcacccccttttcagcaaacggaaatgacagcaagaagttcaaaggtgacagccgaagtgcaggcgtcccctctagagtgatccacatccggaagctccccatcgacgtcacggagggggaagtcatctccctggggctgccctttgggaaggtcaccaacctcctgatgctgaaggggaaaaaccaggtacctgagccgcgtttctccggggtgctcacaccgtgcaggcggggacgaggagggcccagcgctcactgcctccccaacaggccttcatcgagatgaacacggaggaggctgccaacaccatggtgaactactacacctcggtgacccctgtgctgcgcggccagcccatctacatccagttctccaaccacaaggagctgaagaccgacagctctcccaaccaggcggtgcgtggccccgcggcggaccccagcagcccggggacctcgggggtgggcccagccgcaggggccggggactcacggctgtgcctcccacagcgggcccaggcggccctgcaggcggtgaactcggtccagtcggggaacctggccttggctgcctcggcggcggccgtggacgcagggatggcgatggccgggcagagccccgtgctcaggatcatcgtggagaacctcttctaccctgtgaccctggatgtgctgcaccaggtgaggtggtcccatcaccgccagggcaggtcggctgctattgctgtgggcacaggcacacgggaggggcctggcagggctggtgggcaccgggcaggagctcatgctgtggcccgggacctgcagattttctccaagttcggcacagtgttgaagatcatcaccttcaccaagaacaaccagttccaggccctgctgcagtatgcggaccccgtgagcgcccagcacgccaagctggtgagtggggctcccgggacggcgcccgccctggccctggcccggcgacgtctcacggtccctctcccctcagtcgctggacgggcagaacatctacaacgcctgctgcacgctgcgcatcgacttttccaagctcaccagcctcaacgtcaagtacaacaatgacaagagccgtgactacacacgcccagacctgccttccggggacagccagccctcgctggaccagaccatggccgcggccttcggtaagaggctgcccgacgcggcgccagtgtgcagagtggtctattagggccgctcagtccggagccccggcggcacgggcccggccctgcaccagggtgatgcacctgctgctctctgcacggccagcacagcacggtccagtgtcccccacgtcgggaccacggccccccctggagcagcggatctgcccgcgaaggctctgccggggccgcccgccggccgggttggggcccatcccgcagcacagcgcccgctcgcggtggaggttgtgggtgcgatgattagtgtctcatttatttctaggtgcacctggtataatctcagcctctccgtatgcaggagctggtttccctcccacctttgccattcctcaagctgcaggtattcaaacgcttggtcttggttccccagcgactgcatgcccacaccaccttcccaggcagctccgcatccacggcggcagcctgggcggactgggcactcgagtgccaggtcaggggcccttcccgggagaggggacgccacgtccacagagcaggcttggccagggcagtggtaggacagggctgtggaggcccacgtgtggacggcgccagccagaagccgctaatcgcacagtctttgtggtctggttcccttcaagcacctccgggcgagcgcgaggaccgccagtggttggagggatgtctctagtagttgaatttgagtggcctggtaagcgcgcggcccgaggctgagcagcatgaccggcggcgggacgtgtgtgcgtggccgtcctcccgcttcccttctgggaccggggcccggccgccccagtgctggccgtggacggagcagcgcgtgccgcccggcggccgcctcgtctgcatggaggcatgggcgcgcatgcgcggtggtcccgggacgggccctgcttgccgagggccccgtgtctgtgctggcggagccggagcttttctgtgctgtgggcggggcgcatgcagatgagcccaggcccggcccggcccgtgctgtgaggagaggcgggcgctggtgcaggagccggcgggtggctgtgcgggggtcggacgaccccacaggcacccagggtagggccagagccagggccgcctcccgcgcggctcggctcctcggtgcatgaggacggggagcgtcggcctctcccactctgcggtggagtcgggggcgccgccgctcatctcacctcctgcttttccaggcctttccgttccgaacgtccacggcgccctggcccccctggccatcccctcggcggcggcggcagctgcggcggcaggtcggatcgccatcccgggcctggcgggggcaggaaattctgtattgctggtcagcaacctcaacccagaggtacgtgggcttttcctccgcgccgccgttcctcccggaagagcgagcaggggatgttgtgctcgggctcgggtcccggagcagcgccgcccctcgctgtgtctgcgcctctgccctggcagcccctctgctgcagcgctgagaccctccttttccaagatggcttgagttttcctcttttcctgaattcacatcttggttcgcgttttctcttgcatgatacgcagaatgaattattttttggttacccaaaggcaatctaaaaattacttggagctgagcagggcgcgcagttcagagccccagcaggccgccctgctggtcagcgggacacacagggttagcgcggcggggtgtgggcagcccctgtggctcgagagcctgtcacttaactggtggatccgttatttcccagaatggttaaattcccctcggggagagcttgggtgaaacaagaggcccaaaatatgtaactcttgatggatgggatcctcctggaatcagcatttcaggctgttctgtttcccggcaactcctgtgacttcctcaaggcggtgcccagcctggccctccctcgcgggggcccaggacgcactccctgcctgtgcctcttaccacgagccgggtgctgtccctccagctcctcctgagcgaggccgtgcactaacagactcgatctcccttcacgcctgtaatcgtccttagagactgacttgtgccacagctgcgggagacagcgctgctgcagggcttggctgaggtggccgcgagcggagctgcacgcgcgctcctggggggcgtggttgggatcggcttctgggagcccctccagcagcgctgtctctgccggcatgtgagtgaaggtgcttctcttaccgtgtgcccgtcgaggtaaacctgtaactggaatgtgtgtggagtgtgactgatagaacactacctgattcttatgtatttactgacctgtgtttttttgctactttttttcttttctccccttcccctttccctattttttttcttgccctgatccggaatttctttgccaactgactgcacggtacttctgcttcctgttgttgcttgaaacaaaacaaaaacataaacaaataaaaaacaaaaattccccctcaaaccctgctctccggaaaccaacctgcccttgaatattaacatcctgacaacttcatcatccatcaaccactgcacgcctgcggggactgtcttcctcgtgtggacgattggcaactcgccccccttgacctctccctctcccctgtccctccgctgccttgctctgctgtctctaaagagagtcacaccccaaagcctctttattcttttcggtatgttatcgttcacacttttattaccttgttttcattaattgagatgattttgatgccctgagacgtattatgagtttgcggtttggcactctgatgctccgtggcatccgcctcgttttatggtttgctttcggtttgcgaattttatttggtcccgtagatacgtacgcatggtttatcgccctgcatgcttttcagagttagacctgtcggtggcatatgccaccgtggccacccgctggcagcttacctgtcctggatgctatgactttgctgaacggagctgctcctgttagcgcgccctgtggctgcgagacgcagctccgcagtggccgataaagcaaacccggccgggctgagccgggccttgtgggggtgcgcggggccggggctgacggggagatgggcggggcaggcagcaggagactcaggccccatccctgggcttttgaaggcgtctacggtgacgtgcagcgcgtgaagatcctgttcaataagaaggagaacgccctagtgcagatggcggacggcaaccaggcccagctgggtaagaggccggggcggccccggggtggagggggcaggggcgggggctgcgttccctctcgggcgcctggtcacgcgggtgctgctcccccagccatgagccacctgaacgggcacaagctgcacgggaagcccatccgcatcacgctctcgaagcaccagaacgtgcagctgccccgcgagggccaggaggaccagggcctgaccaaggactacggcaactcacccctgcaccgcttcaagaagccgggctccaagaacttccagaacatattcccgccctcggccacgctgcacctctccaacatcccgtgagtgctgggccggggggctcatggggccgggggcgggcaagggctctgcttggctgtcctaccgcgtcggtgtgtggacttctggcgtttccagagtgcaggtcgggcacctcttaccccaaacctgaagtactgcaaggcctggagcttgagccgagggctgctcaagggagggggtcgttggacactttggaggttttggctcaggggatgctccctgtgagaatgtataatgcacacatttatttatttatattttttgaggcgaagtcttgctttgtcacccaggctggagtacagtggaacgatctcggttcactgcaacctccgcctcttgggttcaagtgattgtgccacctc[134 bp omitted]gcctcccaaagtgctgggatacaggcgtgagccaccgcgcctag[132 bp omitted]cctcccgagtagctgggagggactataggtgcccgccagcacgcccggctaattttttgtatttttagtggaaacggggtttcactgtgttagccaggatggtgtcgatctcctgactttgtgatcaacccgcctcggcctcccaaagtgctgggataacaggtgggagccaccacgcctggcctaatgcacacctttataatcccagtactgtggggggccgggcaggggattgcttgaacccaagagttaagaccagcctgagcaataaagtgagacctctgtctctacaggaacaattggttaaaattagctaggagtggtggtgtgcacgtcaggtcccagctcttccggattgggaggttgaggtgggaggttcacttcgcgctcaggaggttgaggttgcagtgagctgtgattgcactgccagactccaggctgggcggcagagtaagaccctgtctgtaaaaattacataatgcaagtatttggaaatgcaggtacatctggccccaagcatgtcaaccagtagtaagccctttgatatttaacacgttacttgtgaaatgttatcagaaaatcaacaaggggcctggcagagtggctcacgcctatcatcccagcactttaggaggccgaggcaggcagatcacctgaggtcaggagttcaagaccaacctggccaacctggtgaaaccccgtctctactaaaaataaaaaaattagcctggcatggtgttgcgtgcctgtaatcccagctacttgggagactgaggcaggagaatcacttgaacctgcaggcggaggttgtggtgagctgagatcacgccactgtgctcccgcctgggcgacagagcaagattccatctggaaaaaaaaaagtggaggagcgtggtactctgtttctgcaaacttgtagatgcctggtttcgttagaagctgcttcagaccattgtggacatgatttgataccccatttctgggctcctaaaaggccctacgccttccccggctactctgaaaactagtctggggaaagcctcgcggacctgactgggcgcccccacccccacgcggccccaggctcacgcctttctcctcccacaggccctcagtctccgaggaggatctcaaggtcctgttttccagcaatgggggcgtcgtcaaaggattcaagttcttccagtgagtatgaggcgggctgtccctggctctccccaggctgccctgcggccggccctgaccccctgtcttgcaggaaggaccgcaagatggcactgatccagatgggctccgtggaggaggcggtccaggccctcattgacctgcacaaccacgacctcggggagaaccaccacctgcgggtctccttctccaagtccaccatctaggggcacaggcccccacggccgggccccctggcgacaacttccatcattccagagaaaagccactttaaaaacagctgaagtgaccttagcagaccagagattttatttttttaaagagaaatcagtttacctgtttttaaaaaaattaaatctagttcaccttgctcaccctgcggtgacagggacagctcaggctcttggtgactgtggcagcgggagttcccggccctccacacccggggccagaccctcggggccatgccttggtggggcctgtgtcgggcgtggggcctgcaggtgggcgccccgaccacgacttggcttccttgtgccttaaaaaacctgccttcctgcagccacacacccacccggggtgtcctggggacccaaggggtgggggggtcacaccagagagaggcagggggcctggccggctcctgcaggatcatgcagctggggcgcggcggccgcggctgcgacaccccaaccccagccctctaatcaagtcacgtgattctcccttcaccccgcccccagggccttcccttctgcccccaggcgggctccccgctgctccagctgcggagctggtcgacataatctctgtattatatactttgcagttgcagacgtctgtgcctagcaatatttccagttgaccaaatattctaatcttttttcatttatatgcaaaagaaatagttttaagtaactttttatagcaagatgatacaatggtatgagtgtaatctaaacttccttgtggtattaccttgtatgctgttacttttattttattccttgtaattaagtcacaggcaggacccagtttccagagagcaggcggggccgcccagtgggtcaggcacagggagccccggtcctatcttagagcccctgagcttcagggaaggggcgggcgtgtcgccgcctctggcatcgcctccggttgccttacaccacgccttcacctgcagtcgcctagaaaacttgctctcaaacttcagggttttttcttccttcaaattttggaccaaagtctcatttctgtgttttgcctgcctctgatgctgggacccggaaggcgggcgctcctcctgtcttctctgtgctctttctaccgcccccgcgtcctgtcccgggggctctcctaggatcccctttccgtaaaagcgtgtaacaagggtgtaaatatttataattttttatacctgttgtgagacccgaggggcggcggcgcggttttttatggtgacacaaatgtatattttgctaacagcaattccaggctcagtattgtgaccgcggagccacaggggaccccacgcacattccgttgccttacccgatggcttgtgacgcggagagaaccgattaaaaccgtttgagaaactcctcccttgtctagccctgtgttcgctgtggacgctgtagaggcaggttggccagtctgtacctggacttcgaataaatcttctgtatcctcgctccgttccgccttcgttgctggcttcctctttctgtgccgcgggcggccccgactcccgcccgggtgtccgccgaagcgccaggtggggccacgggcggggtgggcccggccctgagagtgggggtccctgcgtggggcgtgcgggccagagcgaatgaccaagagccggacctcggtttctgccgctttattgagcatccgcgcggccgcccgcgccctcggcccgccccccgcccgcccccggccccgccgcgctagtcggggaagcggcgcgcctgcatcttgcggaagtagccctcggcctccgcctccgcctcgcgctccgccagccccaggccgcccgcgtggcgccgcagcgtggactcccggctgcccgggcccagcgccccatcggccgcgcccagcgggggcagcccctcgcccgtggccaggttgacggtggccacggccccgaaccgcggctcctcctggtccacgtcgctgaccgacgagccgggggacacgcccgggggcttggccccgccgcggaagccgcgcgccaggtcccccagctcgtagccgccgtcggcctccgccttggccccgccgcccgccgccttccactcccagggcgcgccgccggccgacaggtgcaccacggggtggtgcggcgcgtgcgcgtcgatggtcacgatgctggcggagtcgcggtccgacggcgaccggtactgcgaggagtcggagctggcgctggacgacgacgccgtctcggccgccttggggcccggcgcgcccggagccttggacatggcgatgacctgcagcagccgcggagggttggccactgccgccccgctcttctcggccatcatgagccacttggcgcgcaccccggcgccgcttttgggggacaggccggcccccgtctgcgcgccctcctccgggatgtgcaccagcggcggcggccccgcgcgcggtgggaggatgacccgaggccccagccccggccgcgcctgcacggtggggtagagcgagggcggggccgggccctcgtcctcctcctcttcctcctcctcctcttcctcttcgtcctcctcctcttcctcctcctccgccatgggttcggcgggcgcgcgcaggtgcccggggctggcgtcgtcgggcagccccaggccgcggccctccaggctcttctgcttccactcgctgatgagctgcttggagcgcgaggcgtccagcggcacgtggatggtcatgtggcggcgcgcggggtcgtccagcgagggcgcgctggccctgggcagcgtgtggctgaaggtcaccatgttctccttggccatggggctgcgcggggccagcaggtccacgtccacgctggcgcgcttcaggctgcccagcgaggtcttctcgcgggccacgggccggggcgcgccctccagccgccctgggggccccagctcgtcggtgctcaccgacttattctgctgataaaccgagtcgtggccccgctgcgtcagggcccgcagcgcgtccttggcgggggccggggccgcgggcttctctgcaggtggggcctggaagttgcccaccgcgtggcaggcctgtcggggagaggggtctgggggtgaggcctggggctcagagggctcctcccctgtgatcgttggacttgccgcggggggctctggaccgggggtgggggctggcaagctcttgtccagtgggaccggttcccaccccaaggttgctgacccagcacatcgggcaggtctgagcccacgggattctgactccagcattccaagggcgagacacttcagcacccatgccttccccctaagaccccttcgggacccacgtctatcccctcagacaccctgggcacccgtgcctcccccctagagcccctgggcacccatgcctcccccctcagaccctctgggccagccccccgccagaacccctgggaaccatgcctcacccctcaggctaccagcctcccctgtcagaccccctgagcctgcctcccacctcagacccctgggccagcctccccactcaggccctgtgggcactcatgcctcccccctcagatcccctgggaacccatgccgacccccatcagaacctgccactcaccaggtaggcagcgatgcccgccccgatgaggaagccggcatacacgtccacagggtggctgcggtactgcgtgatctgcgtgagcccgcatacgcccgcggcgatggcaaaggcgaagaccaggatgggcttcagcagcttggtggtgtccgagatgaccgagttgaagtacatctggggcatgggggttggggtcagggagggctccccacgggtcagcaagagggcctgggaagggcagtgaggggccggactcaccgacacatagaccgcggcgaaggctgacagcgtggcgtgctgggacgggaaggtcttcctgtaagaggcgtccagcgtgagccccgcccacctggggaccccagctccagtggcctctctgtgtctctgtttccccgcatgttcaccggggcggaagaaggctcccagtcaggggagttgggggtccggctcaccgtgcagacaggatggcgtggatgtcgtggccggagcagatgtcctgcgtgatgtaggggttgacctcgcaggacgtgcccaggagagtgtagttgggcttgcagacggtgaggaagaagggagtgtggtaacccgtggccagctggatcacgtccgtcaccagggctgtggcacacaggccgaacacgtggacacctgcagggcggaaggctcggccaggcggggagctggggacccgggacagccccaccccctgcatgtggaggtagctcagggtcggggcgcgtcccgcaactcacccacaaaccgcaccgtacgccgcaggaaggagttgaagttgcagccgccggcgttgatgctgccctccgccccggcgggccccccggcacggccccacagccgggactgcagacagtacaacatgccctcggccaccatgatctgccaacagggagggggcgctcaggcctcggtgcccacagggagggggcgctcaggcgggctcccatctgcagtgcccacaggctggcacaggccccggtgtggatgttcaccgaggtggcgggggtgggctcccagccgtggtgcccacaggctggcacaggccccggtgtggatgttcaccgaggtggcagtggctgcggtgcccacaggctggcacaggccccggtgtggatgttcaccgacaggccccagtgtggatgttcaccgaggtggcgggggtgggctcccagccgtggtgcccacaggctggcacaggccccggtgcaggtgctcaccgaggcggcaggggccgcgaaggccaagctgagcagcatcagcagcgggatgagctcctcgttggtctccacgtagggcatggagagagtgcggtcatagcactggaagcccaccttggccggcttgaagaggtcggtcagctccaggaagtacaaggatacgatggaagaagccactatgggcagctgtggggacaaggtgggccaggttcaccctgctctccctcgcggaggcgtctgtccagccctccatgaattcagggccatccaccgtctcactcacctatccacagatccaacccgctcccagccactctttcccccatgagttattcatccatccacagatgctccatctgtaactcgaccatctacacatcacacacccactcactcatcctccatccacccaaacacctatgcccccaacatccacccactcaccgacccatcacccacccatccatccactgggaaccatccatccattcatccatccacccacccacccatcatctatccacccattctccacccatgcacccaacggtacccatccatccatccatccatcacctagccattcattcatctgtccatccatccatccatcatccacccatgcagccatccatctatccacccacccaactgtccatccatccacccacccacccatccatccgtccattcattacccagccattcatccatccatccacccacccatcatccatccacccattctccacccatgcacccacccacccatctacccacctacccatccatccaaccgtccatccatccattcattacccagccattcattcacccatccatccatccacccatcctccacccatgcccccagtggtacccatccatccatccatccattcatcacccagccattcattcatctatccatccatccatcatccacccattcatcatccagccattcattcatctatccatccatccatcatccactcatgcacccaatggtaccatccatctatccacccacccaaccgtccatccatccgtccattcattacccagccattcattcatccatccatccacccacccatcatccatccacccattctccacccatgcacccaacagtacccatccatccatccatccatcacctagccattcattcatctatccattcatccatccatcatccacccatgcagccatccatctatccacccacccaactgtccatccatccacccatccacccacccacccatccacctatccatccacccatccatccattgatcacccatccatccatccatctatccaccctcccacccacccatctaccaacctacccatctatccacctactcatccatctacccatctgtccatccacaacagtcttgctctgttgcccaggctgcagtgcagtggtgccatctcaactcactgcaacctctgcctcctgggtttttgtatttttagtagagacagggtatcgtcatgttgcccaggctggtctcgaactcctaggctcaagtgatacacccgccttggcctcccaaagtgctgggattagaggcgtgaggcaccgcacccagccatggcctcaagcctttttttttcccccactctgtcacgcagcctggagtgcagtggtgcaatctcggctcactgcaaactccgcctccaggttcaagagatcctcccacctcagccctccaagtagctggaattacaagcgtgcactaccacacctggctaattttttgtatttttagtagaggcggggtttcaccatgttccccaggctgccctcgaacttctgacctcaagtaatccacctgcctcggcctcctgaagtgctgggattacaggcatgagtgaccttgctcaggcatggccccagtcgtaatttctgccttgttatggcatcttagcaggggttcagccctcagtccagtcctggggagggcacaggtcagggctgggggctccaggaagggaaaagccatcactgaacatcccagggcagaattggatcgagggagctgagttcatgtccagtgagcattcattgagtgcctgttgcatgcaggcacgaggcccggggcagacgcggaaagtgggtagcagcgtttgtttgcacctgacacccggtttgaaaaccacccactttaacctgtgggcggccagcagaccccctgtgcctcagtctcaccagctgcaaaatgggaatgataaagtagccgcctccaagggctcaggtggagatgagtcaatgtgggaggtggcccctggcaactatctacttgttctctccactttcattatcagcatgattttgctggggcgggcagacagcatcaagcccggggagggtctgaggtggggcctgggcgcggccttaaaaatatctaaccatgggccgggtgcggtggctcacgcctgtcatcccagcactttgggaggccgggacgggcagatcacctgaggtcaggagtttgagaccagcctggccaacatggtgaaaccccatctctactaaaaatacaaaaattaacccagcgtggtggtgcgtgcctgtagtctcagctactccggaggctaaggtgggagaatcgtttgaggacgggaggtggaggttgcagtgagctgacattgttccactgcactccagcttgggcaagacagcaggactccatctcaaaaaataataataataaataaaataataataataaggccgaccgcagtggctcacacctgtaattccagtgctttgggaggctgaggcaggaagatcacttgaggcctggagttcaacgctagc[311 bp omitted]caccacgcacagcctactaaaaatgatttttaaaaattagctggggctcaggctagccttgaactccaggcctcaagtgatcttcctgcctcagcctcccaaagcactggaattacaggtgtgagccactgcgctcggccttattattattattttatttattattattattttttgagatggagtcttgctctcttgcccaagctggcgtgcagtggaacagtctcagctcactgcaacctccacctcccgtcctcaagcgattctcccacctcagcctccggagtagctgagactacaggcacacaccaccacgctgggctaatttttgtatttttagtagaggtgtggtttcaccacattggccagactggtctcaaactcctgacctcaggtgatctgcccgtcccggcctcccaaagtgctgggatgacaggcgtgagccactgcacccagcctactttttttttttttttttccgagatggagtctcactctgttgcccaggctggagtgcagtggcgcgatctcggctaactgcaacctccacctcctgggttcaagcgattctcctgcctcagcctcccgagtagatgggattacaggcgcccaccactacgaccaccatgcccagctaatttttgtatttttagtagagatggggtttcaccatattgaccaggctggtctcgaactcctgaccttaggtgatccgcccacctcggcctcccaaagtgctgggattataggtgtgagccaccatgcccgtcctgcaacaggaatttaagtgcaatttcgaaaaataaacagattttctatgaagtgatgtgggcaacttaatgatattgtgtttgggagggacccacttgcccgggtgtgaggtaacggattacaggccagccgctggccgtgtgacctgcacgggtcactgcttccttgagactagggtcccgtcttccatcgaggctctggaaggcccatcactagagccggttttcctggcctgacatgcaaggatggattaaagttattttattttttgagatggggtctggctctgtcatccaggctgaagtgcagtggtgtgatcttggctcactgcaacctccgccacctgggctcaagtcatcctccatctcaggctcctatgtaactgagacctcagctgcacaccaccacgcccagctattttttctgtttttaaaattttgtagagatgggtttttgccatgttgcccaggctagtcttgaactcttgggctcaagcaatccatctacctgggcctcccaatgtgttgagatcacaggcgtgagccaccaccccagccttaagttactctaccatcctgagccaggtgtgtgccaaaatggtagcttttttgttttagagacagagtctctgtcatccaggctggagtgcagtggtgtgatcacaactcactacagcctcaacctcctgggctcaagcaatcctcccacctcggcctcctaagtagctgagaataaaggcacgcagcacacgcccaactaatattttaattttttctgtagagatgggatcttgctgtgttgcccaggttggtctcaaactcctggcctcaagtgatcctcccacctcagtctcccaaagtgctgggattacaaacatgacaaacgtgagccaccgcacagggcagggggctccatttattacatttattgtcttctttttttttttctaagacagggccttgctctgttgcccaggctggagtgcagtggcatgatctctgctcactgcaacctccacctcctgggttcaagcgattctcctgccccagcctcccgagtagctgggctcacaggcataagccaacatacccggctaatttttttgtattttttagtagagatggggtttca[280 bp omitted]acgtttccgtattctgtagatattaattcctatcagctccaggagtggaaaagcggaggcccagagaggttaggggcagggcaccagcctcaccattagcagaggtgaactcagaccctgaggcttcggagcccacgcggcacctgcacccaaccccaccccctccggcctccccgccccctccaggcccccagcccccgacccccagcccctctgaccacaccttggtcagaagggctcccctcctagcacctgcccacagttcccacggcctggacccccctcggttcctctggagctcctactcgacccgcacagcccaagtcctctgccccaccccccatccgccggacaccccggtcctgccccgccccgaggccactgccggggcagctgcgccggctccggtcccccagcgcgggggtctctgcgggcgggcggaaccgaggcgtctcccccgggccccagcgcgacccccacccacctccacgaagtagaagcagggcagaagcgtcatgctgtccttcgggatcttgttcttctccttggtggagatcatggtgccgcgggcgccgcaggccgtggctggaggggagaaagcggcgctggaggggggcgcgcaggcggagcccgggggagacacggtggccggcgccggcgggggaggggcggtcggggaaactgaggctgcagagagcggcgtccgcgtggcctccccgcgccccggcccagcacgcggcttccgggcgcccctacacccgggatcggggggtcggggccgggatcgccgaggagggcggggggtctccgggcgggagccagtccccgcgtggtggtggggggcatccgggagaactggggttccgggcggcggaggagactgggtccgcgcccccagccccacagcccctcacctggcgcggccggcgcccagcacaaagcgcgtctcctccgtggggcggggccgggagccgggaaggggagggggacgggggaggggagggtccggcccggagacccccgcgcgcgcccagacgccgcagcccagacgccgcagccaggggcgggggctctttgtctgggcgcgtcctccgcaggccccgcgcaccgtccccgcctccctggcgccgcctcccaccgccgggggtctcgggggtctcaggtctgcgcgagcggctggcggggctcgggggtcgcgtcctcctcccttcgggcctgcggcggtgacggtcccgtcctcccctcccgggtggctgcggtcggcccggggggcgccatcgagacgggggcggaggcgggggcgggggttggggtttcggggtctctgactgtctccgtgtctctcacggtctctcgccggctccgactgcccccgccccgcgcctccgcccgcccctccgcggagcccgccgctcgctggtgcgcgtttccatggcgaggctcccagggcgcccggagcatcggagacaaaagagctgggggagggggactggggggtctcccggtgcctccctcccttccccccgcactcaccctcgccccctccgccgcgccggggtccaccctccgcctggccgcagccgctcggtgcgcacggcgggattgcggggcgcggggctgggggctgggggctgcgggatgcgggcagggccctcgggacccgcactcgggcagtgcctgctgtctgcgtgcatttcctcctccatatgcgcagccctgcggggtaggggctggttgacccccgttgtagggatggggaaactgaggcttgggcaccctgggtcgcaatccgaggtctccgggccccaaacggcaggatttacaaaaatcggtttttgggccgtgcgcggtggctcaggcctgtaatcccagcactttgggaggt[134 bp omitted]gaggcaggagaatcgcttgaacctgggaagcggaggttgcagtgagccgagatcgtgccactgcactccagcctgggcaacaagagcgagactctgtctcaaaacaaacaaacaaacaaacaaacaaagagtgacttccaggctgggtgcagtggctcaggcctataatcccagcactttgggaggcagaggcgggaggatcccttgaggccaggagttccagaccagcctggccaacatggtgaaaccccatctctactaaaaatataaaaattagccggacatggtggcaggcgcctgtaatcccagccagatgggaggctgaggcaggagaattgcttgaacctgggaggcggaggttgcagtgagccgagatggcaccattgccctccagcctgggcgacagaaggagactctatctcaaaaaaaaaaaaaaaaacaaacaaacagtgactccagagggttggagccctgctagataccttagtttgctcataacaggcactgctgcccccgggaagagggtcgcctgccataaatgcggaaacagttaaatggcgatgggaataggatgggaactcaatggtgttgctacctttggatggactcggaggcagcccagcttcctgggacaggactgcacggactgcctggggaggggtctttggccccccggttcctgcaggggggctcggggaggccctgtgagcagttggtcacaggtgggtcccattcgatgcgatcctgttcctccccaacagccctggagaagggggacgttgcctgctgtggctgcggctgttttcctggcctgtgagaggcggggccagagtggccgttgggaatctgggtgttgcaaggtgaccacaaacagctctctgggggaggaggaggaaaatgcaattgattttcaggagccttctgaggtcaggagtgggagagtgtgcagggggaccctcctggcagcttgggggtccaacagaagatctgggggagtctcagggtcttctccccctaggatcaccagtggtggagatggggcaggcctggccatggagggcacgttgcttggctgaggggcctgggcttgagtgtggggcctgggcttgagtgatgggagagttccgagcaggccggaggggttgagcgtaccagacgctgctcaaaacttttatttaaaaatgattattattattattactattattttgagatggactcttgctctgtcgcccaggctggagtgcaatcgtgcgatttcagctcactgcaacctcccacctcctgggttcaagtgattctccctcctcagcctcccgagtagttgggattataggcgcctgccaccacgacgggctaatttttgtatttttagtagaaagaggatctccccatgttggtcaggctggtgttgatctcctgacctcagctgatctgctgcctcagcctcccaaagtactgggatgacaggggagccacggagcccagcctttttttttttttttgggagacggagttgcactctgtcgtctaggctggagtgcagtggcgcgatctcggctcactgcaagctccacctcccgggttcacgccattctcctgcctcagcctcccgagtagctgggaccgcaggcgcccaggactatgcccgggtaattcttttgtatttttagtagagacggtgtttcacc[140 bp omitted]ccaaggctggtctcaaactcctgggctcaagtgatcctcccacctcggcctcccaaggcactgggattacaggcgtgagccaccacgcccggcctcaaaaacttttcagaatatgaaccccactccatgctcagcactgttctgtctagaaggcagagtctatccctgtctcagggcacactgacgtgcagacagcgagctcgccctgaggtcatgcgactgggagggacagagcttccggctcccggcagaggggaaatggggcctggcccacgggagagctgaggcccacgtttggccaggacagggtggatggaggctggggcctccgcagggaagatggacaggtaggatccggggtgggcagagagggagagctggcttggacggaggcagggatctgggggctgtgccatggaccctgtgaggtggctgggctgtgaaactcagtggagaccggaattattattattattattatttttttgagatggagtctcactgtctcccgggctggagtgcagtggcacgatctcggctcactgcaagctccgcctcctgggttcacgccattctcctgcctcagcctcctgagtagctgggactacaggcgcccaccaccacgcccggctaattttttgtatctttagtagagatggggtttcaccgtgttagccaggaaggtcttgatctcctgacctcatgatccgcccgcctcggcctcccaaagtgctgagattacaggtgtgagccaccgctcccggcctggagaccagatttgagccctgggaccctacattcccgatgggcagcggacctcaaggcacaccggccccgcctccctggactctccccgtatccgccccttggaggggcaaactgccctcagagggctcccacaggcccagacacaaactggtgtccccaagggtgtgggggacacggtaagctccagacctcagtttcaccttggaaatgagcccctttgtaaaaaatggaggtgagtttggacgcagtagctcacacctgtgctcccagcactttgggaggccgaggcaggtggattgcttgagcttaggagtttcaaaccagcccgagcaacatagtgagactccacctctacaaaaaaatacaaaaattagccgggcatggtggcatgtgcctatggtcccagctacctgggaggctgaggcaggaggattgctggaacccgggaatcggaggctgcagcgagctgagatcgtgccactgcactccaccctgggcaacatagtgagatcccatctctacaaaatatacaaaaattagccgggcacggtggcgggtgcctgtggtcccagctactcgggaggctgaggcaggaggatcagttgaacccaggagattgaggctgcagtgagctgagatggtgccgctgccctccagcctgggcaacagcgagacctcaactctgaaaaaaacaaaagaaggagatgaaatttacataacttaaaattagccattttgaacggtacagtgaagtggttttcggtgcattcaccgacttgtgcaaccatcactgctgtccagtcccagaacattccatcaccccaaagaaggaagccccatctccatccatcagccatcaccccctgccctcccccggcccctggcaaccacagatccacttcctgcctctgcagatttgcttgttctggacatttcgtctatttatttttatatagtttttaatttgtttttatttattttttttgagacggagtctctctgtgtcacccaggctggagtgcagtggcgcaatctcggctcactgcaacctccacctcccaggttcaagcgattatcctgtctcagcttcccaagtagctgggactataggcgcccgccaccacgcccagctaatttcttttttttttttgaaatggagttttgctcttgtcgcccaggctggagtgcaatggtgcgatctcggctcgctgcaacctccgcctcccaggttcaagtgattctcctgcctcagcctcctgagtagctgggattacaggcatgtgccaccacgcccagttaattttgtatttttagtagagatggggtttctccatgttggtcaggctggtcttgaacgcccaacctcaggtgatctgcctgcctcggcctcccagagtgctaggattacaggtgtgagccaccgcacccagcttgtcaattatatctcaataaagctgttgaaaaagtttaaaaaaatcacccaatcgggcacagtgtttcacacctgtaatcccagcattttgggaggccgaggtgggtggatcacctgaggtcgggagtttgagaccagcctggccaatatagtgaaaccccatctctactaaaaatacaaaaaattagccaggcgtggtggtggacaactgtaatcctagctactcaggaggctgagacaggagaatcacttgagcctgggaggcggaggttgcagtgagtcgagatcacaccattgcactccagcctgggcaacaagagcgaaactccgtctcaaaataataataataataataataataataatcacccatacagacgcgcaggactcaacgcaggactgccagctccactgccctgagccccccggtgccaggcccagcgggcagtgctggagccccagtggcttgggatggggagactgggactctgagctggcaatgttcctgggtgctggctgcatgcccgccatgtgctgggctccgggatccactggttcctgacaccctcacctgcccctgggggtgtggccatcttctagagagggaaactgaggatcagtgcagaatgtagggggagcccaggctggcccagggagcagttggcggtggaggccttgggcaatttcccgtgttcccactgagtggggctgtccctgggcctgggcggggacgccaccaactgccaaggcctgtgtataagggcagccgccgccttagccacagacctgccccgccatgacccggctgacagtcctggccctgctggctggtctgctggcgtcctcgagggccggtgagtgcctctctgtgccggtggtcccccatctgtgctagggcccggctgccagggcagaactcagacttaaagcacagagaaggcaagcggcttggcctgggtcacacagccagcccggcctggacgatcccgcgaaaggcgtgagggcggacggtgtgcgggactcaggggccccctgtcctcttagggagtgggacgatgggggagggtgggtccccccgcagccccactgggtggatagagctgaggctgcagcttcacacgccctcccggccactgtgtggattcttggggatctcagagctgtctccccccgacccaggctccagcccccttttggacatcgttggcggccggaaggcgaggccccgccagttcccgttcctggcctccattcagaatcaaggcaggcacttctgcgggggtgccctgatccatgcccgcttcgtgatgaccgcggccagctgcttccaaagccagtgaggggtcctggggagggggcctagggggcattggggctcagagaaggggcttggggggcttaggcattcagtgggggtgcttggtaggtgaggaggggaggggattgcaaaaggaggggctcagggaaaggagggggcttggagagggaaatggggactgagttgaggagggacccaaggatattggggggctcagatggaggaggcccagagaagggaagggggtcagatggaggaggcccagagaaaggaagaggctcagatggaggaggtgcagtgaaggaaagggggtcagatgggggaggcccagagaagggaaggggctcagatggaggagggggcccagagaaaggaaggggctcagatggaggaggtgcagagaagggaagggggtcagatgggggaggcccagagaagggaaggggctcagatggaggaggtgcagagaagggaaggggctcagatggaggaggtgcagagaagagaagggcctcagatggaggaggtgcagagaagggaagggcctcagatggaggaggtgcggagaagggaagggggtcagatggaggaggtgcagagaagggaagggggtcagatgggggaggcccagggaagggaaggggctcagatggaggaggggcagagaagggaagggggtcagatgggggaggcccagggaagggaaggggctcagatgggggaggcgcagagaagggaagggggtcagatggaggaggtgcagagaagggaagggggtcagatgggggaggcccagataagggaatggggtcagatgggggaggtgcagagaagggaagggggtcagatgggggaggcccagataagggaaggggctcagatggaggaggtgcagagaaggggagggggtcagatggaggaggctcagagaagggaagggactcagatggaggagggggcgcagagaagagaaggggctcagatggaggaggaggcgcagagaagggaaggggctcaagatgggaagggggccctggaaagtctcggctctgcttctgtaaaagcgggggagttttcagggtgaaggattgcagtctgcaggctgggatcccccctaatttgcaagccggcttgctctgtgcccaggccccagcctggtgtcctccctctgccctttcctccgctactctcaggaaccccggggttagcaccgtggtgctgggtgcctatgacctgaggcggcgggagaggcagtcccgccagacgttttccatcagcagcatgagcgagaatggctacgacccccagcagaacctgaacgacctgatgctgcttcaggtgagaggatggtgccacctgtgatcccagcacctcgggaggccgacgttagccagggaaacaagtccaaacttggtctctacaaaaaaatacaaaaattagccgggagtggtggcgcgcacctgtggcccctgtgcttcaggaggccgaggcggaaggacggcttgaggtcaggagttcgagaccagcctgggcaacatggccaaactcagtctctacaaaaatatatatgtgtgtgtgtgtgtgtgtgtgtgtgtgtgtgtgtgtgtatcttgccgggtgaggtggctcatgcctgtaatcccagcattttgggaggccgaggtgggcggatcacgaggtcaggagattgagaccagcctggccaacatggtgaaaccccatctctactaaaaatacaaaaattagccaggcatggcagcgggcgcctctagtcccagctactcaggaggctgaggcaggagaatcgcttgaacccgggaggcggagcttgcagtgagccgagatcgcgcccctgcactccagcctgggtaacagagccagaccctatctcaaaaaaaacttccaaaaacaatacagcaacacatacagatgtaccacggttcgcgtatggagcctcctgttggtggagactgacgtcgttttcaaatgcttttgctatgacagaatcatgtgaatgtttttcatgtttggtttttttctttgagaaaatgataaaattatctcaaaaatatcattaaaaaatttaaaaaagtagagacgggggtttcaccttgttggccagtttggtctcgaactcctggcctcaagtgatccacccaccttggcctcgcaacgtgctgggaatacaggcgtgagccaccgcacccggcccctgccgggaattaaacgcaaaccacttacagactacagttaatgtcgctgacacttctgctcccaggggtccccatgaggctccagtccccagggccaccctcccctgactccatttccttccccagctggaccgtgaggccaacctcaccagcagcgtgacgatactgccactgcctctgcagaacgccacggtggaagccggcaccagatgccaggtggccggctgggggagccagcgcagtggggggcgtctctcccgttttcccaggtttgtcaacgtgactgtgacccccgaggaccagtgtcgccccaacaacgtgtgcaccggtgtgctcacccgccgcggtggcatctgcaatgtgagtgctccctgtggcgggaggaggggtcctgagaggtactgagctctccgtggcaggagaaagcaagtgcaggctgagggcggcac[151 bp omitted]gcgattctcctgcctcagcctcctaagtagctgggattacaggcatgcgccaccacgcccggctaattttgtatttttagtagagacagggtttctccatgtgggtcaggctggtctcgaactcctgacctcatgatcgacccaccttggcctcccaaagtgttaggataacaggcatgagccaccgtgcctggctgagaaacagtagctatcaaacgccggctgtgagccacgtctgtgctgggggttggggacccagcaggcatggtagagccggtcactgagggactcaggcgtgtgattgccaggggaggggcacctggcccagcctggaggtgccaggaagctccagaaagcaactgatcccaaagtccactagcagttaaccagggcagagaaagagaagagccatgcaaaggccctggggctggatcaggacttgtaggttccaggggcagcaagaggcctctgcagttctggggtggcgtgggagccaggccctgggacgccctgacacagctgctgcctgcccagggggacgggggcacccccctcgtctgcgagggcctggcccacggcgtggcctccttttccctggggccctgtggccgaggccctgacttcttcacccgagtggcgctcttccgagactggatcgatggtgttctcaacaacccgggaccggggccagcctaggggggcctgtgacctcccatggagcccagccccgccctccacacctccggcgctccgcacccacctcccacggccccgcccctgcccccgctccggccagaggggccctggctgtaataaagaagccgatctctcctctgctcctggtttctgttcattggtgggggagggggctgtggggacgcgtgagtggcaccttcaccggccttaggggcacccaccgcaggtgcactgcctgtgcagatgtcagatgttcagagattccctcaaagcccgggaagcaggggctggtgttatctgcacccgacagcggggtgttggggggaggcccaggttcagagaggttgggtggctgcccagaggtcacacagtgaatgccgcccagcactttgggaggccgaggtgggcggatcacctgaggtcaggagttcaagaccagcccggccaacctggtgaaaccccatctctataaaaatacaaaaattagccgggcatgatggcgggcgcctgtaatcccagttacttgggaggctgaggcaggagaatcacctgaacccgggaggcggaggttgcagcgaaccgagatggcgccactgcactccagcctgggcgacagcgagactccagctcaaaaaaaaacaaaaaccacgggagaaaacggggaacattctcctcttggatccaatagaaacagtaaaacgtgaatatgaaataataaatataattgtatatataaataatacagaataaaatatgaatatgatggctggatgtggcagtcacatctgtaatctcagcactttgggaggccaaggtgggagcatcgtttgagcccaggagtttgagaccagcctgggcaacgtagtgaaaccatgtctctacaaaaataatttttaaaattattaaaattacacaggagaggccggg[138 bp omitted]gtggcgggcgcctgtagtcccagctactcgggaggctgaggcaggagaattgcttgaacccgggaggtggagattgcagtgagccgagatcacgccactgcactccagcctggtgacagagcaagactccgtctcaaaaaaaaaaaaaaaaagccgggtaagtggcacctgtcgtcccagctactctggaggctgaggtgggaagattgcttgagtccaggaggtggaggttgcagtgagccgtgatcgcaccactgcactccagcgtggtccacagagcaagacccagtctcttaaaatgataataataataataataataataataataataataagaagaagaagaagaagaagaagaagaagaagaagaagaaggaagaagaagaagaagaagaacctgtagtctcagctattgaggaggctaaagtgggaagatcactttagcccaagaggttgaggatgcagtgagctatttttatctcatttatttatttatttgagacagagtctccctctgtcacccaggctggagtgcagtggcgcgatctcggctcactgcaacctctgcgcccccagttcaagcaattctcctgcctcagcctcctgagtagctgggactacaggtgtgagccacaatgcctagccaatttatatatatatattttttagtagagatggggtttcattatg[139 bp omitted]aggctggagtgcagtggcgtgatcaaggctcactgtagcctcagcctcccaggcttcagcaaccgtgcccggccttagaattcactcttttaaagtgtgtacagccgggcgtggtggcccacacctataatcccagcactttgggaggccgaggctggcaaatcacctgaggtcaggagtttgagaccagcctgcccaacatggtgaaaccctgtctgtactaaaaatacaaaaaattagcctggcatggtggcatgcacctgtaatctcagctagtcgggaggctgaggcaggagagtggcatgaacccgggaggcggagcttgcagtgagccaagattgagccaccgcactgcaggctaggggatagagtgagactctgtctcaataaaataaaaaataaaataaaataaaatgaagtgtgcaattcaatggtcttcggtacactcacaatgttgtgtggtcatgacctctgttgagttccagaatatttcatcaccgccaaaggaatccctgtccccatcagccgtcactccctgtcccctccccagtccgcggcacccacgcgtcctcttcctgtctctgtggatgggcttgtcctggacatttcatagcaatgggatcacacactatgtggtctttcgtgtccggcgtctctcacggagcgtgacgtcctcacggtgcctccgcgccgtggtcgggtcacagctgggtccgtttcacggctgcgtcctgttgccacgcctggaggcctcactgtgctgctcgaggcccctgtggatggacgtctgagcctctccacttccggccactgtgaccctcactgctgtggacactcatgtgcaggtttgtgttggaactgctgcttttctttcttttgtgggtataacgggtccttttttttttttttttttgagacggagtctcgctctgtcgcccaggctggagtccagtggcgcgatctcggctcactgcaacctccacctcccgggttcacgccattctcctgcctc[175 bp omitted]cccggccaacgggttctctttacagagggggaaactaagcctagagaggggtgccaatggctcaggagcccagccggtgggggccctgcctgggtttggagaggcaaagccactgcctgatcattgttcagatggggaaactgaggcccaaggcaggattggggttcaagggcttctggtgcccccggctcggggccacgttcggtcatgagggtccccctgctggggcgggattcctgccagaggcggtttctgccctcctccccccagcccctgctgctcccccttcctgggcccaagggtgctgttctcgggttcccctggtagcggtcagcccggctgcagggccctcagagcggggctgcgtgtgactgtgggcagcccgagtcctctccgcgcctcggatttcagggacatagaacggggtcccatccgtggacccacccgccaccccgcagccccgtccaggccccgacgcgtgcagcccccaccccgcagccccgtccaggccccgacgcgtgcgtgcagcccccaccccgcagccccgtccaggccccgacgcgtgcagcctcctggcagagccagctgtgctcaggctaaaaacagctgttctgtttcttctctgtgcccctctacccggccccactcactggtgtcttgagaaggtttttaaattttcggaattctcagaacagattgtgaaatgtctgggtttggcttagaaatcccgtgagagggggcatcaggggacaggtgggtggatgggcctggggggtgtggaaggcggccgggtgtcagggccccaagcacacgggaaggtcaacggtcggcacaaaacacacacaaaacacaaccactgcgaggctgagcctcgcgggcgaaccagcatcttcccgtcactcagggagagaaggttttcc[137 bp omitted]tctactaaaaatacaaaaattagctgggtgtggtggtgggcgcctgtaatcccagctattcaggaggctgaggcaggagaatcgcttgtacccaggaggcggagcttgcagtgagccgagatcgcgccactgcactccagcctgggcaacagagcaagacttcatctcaaaaaaaaaaagaaagaaagaaagaaaaagaaagtagtagaggagagaaaaaagagagaacaagaaagatggagagacagagacggacagagacacagagacagagagagacggaaaaagagggacagagccagagagactgagagagatagttttaaaaaagggagacagcgatgacacagagagacacagacacagacacagagatgaagagacagacagatatagggagacagagacagactgagacagagagacagagacagagggagacagagacagagacagagaaggagacagaaagagggcggggagagagacagagacagagacacaggcctgagccccgcatgggtctcccctcggccccaggcggcgtcacctgcgatccctgaagccgttaccagttgcgccacctacggttggtacaggaaggggcccccactacctctgcccccaggccgacccctgcaaagcccccagcgtgttccacggaaccctccctgctacccgctcccagcgctcctgtcgccctggcctgtgcttttgagtccccccaggacgcacagggagcctggaggacccggggcccgcgggacggtgctgggaccctccggtcaggaccgggctgcatcagccttgcgtggaaacagatcctgacggggaagcccacgtacagtgaggacggggcagccccctgggcagctctcgcgtgtgctagatccagcagtgtgtgtgcaaggtctttcttttctttcttttcttttttttttggttgacagctttattgagatgtccttcacacacaccaagcaattcacccacttaacaattcggtagtggccagatggtgggggaggatcgctggagcccaggagttccagacgagcc[139 bp omitted]catggtgaaatcccgtctctactacaaatacaaaaaacaaattattcaggcgtggtggcaggtgcctgtaatcccagctacttaggaggctgacgcaggagaatggcttgaacccaggaagccaaggtcacaccactgcactccagcctgggtgacaagaacaaaactccatgtaaaaacaaatcaagaaacctcaaatccgtcgacccccactgctgccctgcagaaggtcctattaccgtcctcacccgcctttacaggtggggaaactgaggactgcaagccaaacagcttgcctcagcatgagctgactcatggctgaaaccaacagcacttttgttgaatgagaataacccttttattttgagacggtgtctcgctctgttgcccaggctggagtgcagtgacgcgatctcagctcactgccccctccacctcccgggttcaagtaattctcctccctcagcctcccaagtagctgggattacaggcatctgccaccacacccagctaatttttgtatttttagtagagtcggggtttcaccatgttgcccaggctggtcttgaactcctgaccttgtgatccatctgcctcagcctcccaaagtgctgggattacaggcaacagccac[137 bp omitted]tgcctcagcctcccgagtagctgggactacaggcgcccgctac[187 bp omitted]gctcatgcctgtgatcccagcatttggggaggtcaaggcaggagcgtccctgaaggctggcagttcaagaccagccagggcaacatagcaagaccccatttctacaaaaaattaaacagccaaccaaaaaaaaaaaaaaaaagaaagaaaaactttagctggacatggtggagcatgcctgtggtcccagctacttggggggttgaggcaggagaattgcttgagcccaggaggtcgaggctgcagtgagccatgattacaccactgcactccagcctgggtgacacagccagaccctgtctcaaaaaatatatatgtatattttaaaatattatatattatataatgtaaataatatacatgctacatattttatgtatacatctatgttatatacattaatatagccaggtgcagtggctcacacctgtgttcccagcactttggcgggattacgggcgggtcacctgaggtcaggagttcgagaccagcctggccaatatagtgaaaccccgtctttactaaaaatacaaaaaaaaaaaaaaattagccaggcgtggtggtgggcgtctataatcccagctatacaggaggctgaggcaggagaattgtttgaacccggg[136 bp omitted]gaccacgtggtcaaggttattaccatcagcacgagacaggccgaagccatgggcttcgacgtggggggcctgagacagacacacgccacgcccgggactccctccattgagtcctgaggccacccaggaccatccccacggagggacgctctgcagagtgaccaccagctctcctcaatggtcccaagggctgagggagggcagagggactgcgcccgctggaggagaccctgacatctgaagatgggtggcttgtgtacccaggacccagcaaagggtggctggtgatactcagggggctggggcagagggggccatttggaatcaactttcgcgccctggcttcgatcacagcctggagggttgagcaagaggacagaatttagggaagctgggggagggaggccgggggagggagtttggggagcggggagggagtttggaccctttggacttctgtaagcgtgaaatcctttccaaatgaaacgttaaaaagctttttttctttttggcctccaagttcattcagtgcttctctccatttcactgtaggtttaaaccgttcagttataaataaataattttatcctctgtcctcggctttcccccgtttccggcactgcagacatgggggctggatttgtctctgcggcggggccatcctgggcactgcagggccctgccaggagctccctccaagtcgtgacaaccacggatgtctccaggcctcacacagggacccctgggggcagaatcaccccagggttagaggattccacagaccccaagagactctgagtcccatgatcctctgccctgctgaggtcccaggaggctgcacacattgaaatccacaccctgagtgggagggagagaggaggcgagtcccgggagctggggtcccccgggtttatgccgtacgccccatcgggagtttattctggtgtccggtgtgagcagggggcagactggattttttattttttatttttatttatttatgttttgagatggagtcttgctctgttgcccaggctggagtgcagtggcacgatcttggctccctgcaaccttcgcctcccaggctcaagtgattctcctgcctcagcctcctgagtagctgggactacaggcgcccgccaacacgcgcagctaatttttgtatttttagtagaga[141 bp omitted]ctctcccctgggccctgtggacatcggggctggatccttctctggggcaggcccgtcctgggcactgcagggtgctaggcatcatccttggcctccacccactccatgccaggagctcccctttcgtgacagccacaggtgtcctcagacctcgcccagggtcccctgggggcagaatcacctcttgattgagaatcctggccttaaagggggaagaaaacccccagacaaaactggcaggaggatgttcgctggggcctcaggtgaggcactgagggcactcgtggtggggccctgccttcccgagctctgcatcctgtcccctgctacgtcctgctgtctgtccgtttccagctcacccacccacgggacacacctgccacggccggctttgctggggccacagggacctcgtcagggaggcgtctccttgtgggtggcacgtgggcatgtgttgctctgagggctgtggccatgttgcccacctggccagggacccccgacttgggtgggtgacagccagcctccccgcccccacaaaggttgggaccttgagcccaaagcccccacctcctccccggagtccgttctgactcccaggctcccaaggcaaaaggaggaagtggggacccagcctgggcattgggcaactcaacggcctctggcattgggctataagaggagcttgaccgtgggtgcaccctggaccccaccatggctcaccggccccccagccctgccctggcgtccgtgctgctggccttgctgctgagcggtgagtgagccacgtgcccatccatccagcctccaggccccggtggattgtggggaaatatccaccacgaggtccatccaaagcccttctggcacagctggggaaactgaggcagggtcaggggagactccactcactgctcgggaccaacgcttgcaggggtggggaggacaagggcaagggggagccctggccatttgactcagttgcctatctgtaaaacgggcaaaacccagcccttccctcctgaggagctgttttgggaattagctagtaacaggcgaattcctggacagcacccagccttcagcaaatgctcagtgaatatgcatgaatgaatgaatgagtgaatgaatgagtgagtgagtgaatgagtgaacaaatgaatgagtgaatgaatcaatgagtgagtgaatgaatgagtgaatgagtgaatgagtgaacgaatgaatgagtgaatgaatcaatgagtgagtgaatgaatgagtgaatgagtgaatgaatgagtgaatgagtgaatgagtgaacgaatgaatgagtgaatgaatgaatgagtgagtgagtgaaagggtcgaggagttagtgatgctggaatcaggggaagaagagagcatgggccccctcaggtccctatcctgaggg[134 bp omitted]gcctcccgagtagctgggactacaggcgcccaccaccatgcctggataattttttgtaatttttgtagagacggggtttcaagg[139 bp omitted]aggctggagtgcagtggtgcaatctcagtttactgcagcctcagcctcctggggtcaaatgattctcctgcctccgcctcttgagtagctgggattacaagcacacaccaccacacctggctagtttttgtatttttagtagagatggggtttcaccacgttggtcaggctggtctcgaactcctgacctgagggggattttcaatgcctcagtttgttcatctgcaaaatgggtctctttgttggctgatttttttttttttttttgcttctttttttttattttgttttgttt[132 bp omitted]tgcaacctgtgcctcctgggttcaagcgattctcctgcctcagcctcccaggcagctgagattacaggtgcgaaccaccacacctggctaattttttttttttttttttttgagacggagtgtcattctgttgccaggctggagtgcagtggggcgatcttggctcaccacaacctccgcttcctgggttcaagcgattctcctgcgtcaacctccggagtagctgggactacaggcacgtgccaccacgcccagctaatgtttgtatttttagtagagacagggtttcaccatgttggccaggatggtctccatctcttgacctcaggtgatccacccacctcggcctcccaaagtattgggattacaggcgtgggccaaccgcacccgaccaatttttctgcttctttaaaaacatttttttaaattttgttttagagacagggtcttgctctgttgcccaggctggagtgcagtggtgtgatctcagttcactgcagccttgacctcctgggctcaagcgatcctccctcctcagcctcccaagtagctgggacgacaggtgcacaccaccatgcctggctaattttaaaattttttgtagagatggggtcctcacaattttgcccaggctggtcttgaactcctgagctcaagggagcctcctgcctcggcctcccaaagtgttgggattacaggcgtgagccactgcacccagccacctggtctgcgtcttaaaagccttcctgactctcaggactgaaagctgccaccagggcgcctttggaaatcgtcgtaattataacccccccggcctgggcgctgagtccttcccaccagccagcaggcactgaccgggttgcagatcgggagacggaggctcggagaggcccaggggctgctctgccatcccccctttccctgcagcctgggggctccctgacgcctggactccccccctgcaggtgctgcccgagctgcggagatcgtgggcgggcacgaggcgcagccacactcccggccctacatggcctccctgcagatgcgggggaacccgggcagccacttctgcggaggcaccttgatccaccccagcttcgtgctgacggccgcgcactgcctgcgggacatgtgagcggccgcctccacacccctgtccgcccgccccgccctcttcctccagccctggcccggccactgtccctctgcccggggaggacccagctaagccccgtctgcagaccccaggccccgcgcgcgtgggcagttctggggggaggcccggggcagggtcgccgagggaggggtctggggctgcaccgcggcctcgggaagggccggctgtgggcggcggcgagtgtccagggcgccgaggagtgaccaccccacccccgcagaccccagcgcctggtgaacgtggtgctcggagcccacaacgtgcggacgcaggagcccacccagcagcacttctcggtggctcaggtgtttctgaacaactacgacgcggagaacaaactgaacgacgttctcctcatccaggtgggcgggcagggccgcgagggctcggaggggcacggccagagggctccgggacccccattcctgcagccagcattcattgagcacccactgtataccgggccacgaccgaggccgctgcagcctgggtccagtggcactggccgggggagaccgctccttggacaccaggccactcctcctccccgcctctcccccgcccgcgcctctcccccgcccgcgcctctcccctgcgcgcctctcccccgcccgcgcctctcccccgcccgcgcctctcccccgcccgcgcctctcccttgcccgcccctctcccctgcccgcgcctctcccctgcatgcctctcccttgcccgcccctctcccctgcccgcgcctctcccctgcgcgcctctcccctgcccgcgcctctcccccggccgctcctctcccccgcccgcgcctctcccccgcccgcgcctctcccctgcgcgcctctcccctgcctgcccctctcccctgcctgcgcctccgcccggtgtgctgttcccccagaaagccaggtgccctcgcctcctccggcgcctcccctgacctcactggaagtggcgaggacagccacagccctccccgattcactgttctccactgaaccgcgtgctcctctcattcatggggccctcctagcctcctcccacccagaaagatcagctccccagggcagaggatttttgtctgtgttgttcgttattggactcatgtggcttagaacgggactgggcatacaggtggtgctcagtaagtgcttggggctgggcactgtggctcacgcctgtactcccagtactttgggaggctgggatgggaggatcacttgaggccaggagtttgggagcagcctgaccaacctagtgagaccccatctctataaaagacattttttttttttttttttttagacagagtctcactcagtcatccaggctggagtgcagtggtgcaatctcggctcactgccacctctgccttccaggttcaagtaattctcctgcctcagcctcctgagtagctgggattacaggcatgcaccaacacgcttggctaatttttgtatttttagtagagacggtgttttgccacgttggccaggctggtctcgaactcctgacctcaagtgatctgctctcctcagcctcccaaagtgctgggattataggagagagccaccgcgtccagcctacaaaagaaaaatttaaaaatcaaccgggcatggtagcacacgccaagccactcatgagctgagatgggaggatcacttgagcccaggaggttgaggctgcagtgagctgtgatcatgccaccacactccagcctcggcgacagagcaagacccca[134 bp omitted]ccccgtgtctactaaaaatacaaaaattagctgggcgtgacggcaggtgtctgtagtcccagctacttgggaggctgaggcagcagaattgcttgaacccaggaggcagaggttgcagtgagccgagattgtgccactgcactctagcctgggcaacaagagcgaaactccatctcaaaaaaaaaaaaaagaaaagaaagaaagaaagaaaacatgaatgaatggccgggcactatggctcacacttgtaatcccagcactttcggaggctgaggaaggcagatcacttgaggttgggagtttgagaccaggctggccacctcacccaatgggatggctccgggaggttccagtgagccgagatcacgccactgcattccagcctgggtggcagagcaagactccatctcaaaagaaagaaagaaggaaagaaaatgaatgaatacaatagtgacaaatgggacaaagggggtcgtggggcccaggcggagggagcggcatccgcggcgttttgaggtggtgggtgtggtgggtgtggtgggagggcggcccgggcggccaccgtgacctggaagcagcgtctcaccgccgcctgccttctgccccagctgagcagcccagccaacctcagtgcctccgtcgccacagtccagctgccacagcaggaccagccagtgccccacggcacccagtgcctggccatgggctggggccgcgtgggtgcccacgaccccccagcccaggtcctgcaggagctcaatgtcaccgtggtcaccttcttctgccggccacataacatttgcactttcgtccctcgccgcaaggccggcatctgcttcgtaagtaaccgtgcccccaccccgggcaccgggctgccatgaggggaggagggcggcggccagggttccacgccacctcttagctgtgtggcttcatgctgtgcctcagtctccccacctggaaggtgggcacacccaacacccaacgggcaggctcagcggggtgggggcgctcacattgcacctggctgcttgggtgggtctgggggttccctgccccccactcccctctaggaccacaggaaggtgtgggagacccatccgccctcaccggcggccccttccagaatccaggactccaggtatccagcgggaggcccataaatgcccagttcctacgaaagacctcagcccctccctgctcacactttttgtttgtttttgagacggagtgtcgctctgttgtccaggctggagtgcagtggtgagatctcagctcactgcaacctccacctcccaggttcaaggtattctcctgcctcagcctcctgagtaactaggtgcacaggtacctgccaccgtgcctggctaatttttttggtatttttagtagagatgaggtttctccatgttgaccaggctggtcttgaactcctggcatcaagtgatgcctggctggtgctcacacattttaaagaaaattccaggccagcagtggtggctcacgcctgtaatctcagcactttgggaggccaaagcggaaggatcttttgagtccaggagttcaagaccagcctgggcaacatagcagggtggcatctctacaaataatttaaatattagctgggcatggtgatgtgagcctgtaggcccagctactcaggaggctaaggcaggaggatcacttgagcctggggagttcgaggttgcagtgagctatgattgtgccactgcactccagcctggagaacagagcgagaccctgtctcgagagaaagacagccagctactcgggaggccgaggcaggagaatcacttgaacccgggaggcagaggttgcagtgagccgagatcacggcactgcactccagcctgggtgacagagcgagactctgtcgcaaacaaaacaaaaacaaaacaaaacaaaacaaaaggagaaagaaagaaagagatagagagagaaagaaagaagaaagaaagaaaaagagagaaagaaagaaagaaagaaagaaaaagaaagagagagagagagagagagagagagaaagaaagaaagaaagttccatattggaagcattttattctgaaacagctgtggctaccccagcccccttcctggctgcctggggccagcccgggtgactggctgtccccatcctcccgggagactcaggtggcccctgatgggtgactggccgtccccatcctccagggagactcaggtggcccctgatgggtgactggccgtccctgtcctccagggagactcaggtggccccctgatctgtgatggcatcatccaaggaatagactccttcgtgatctggggatgtgccacccgccttttccctgacttcttcacgcgggtagccctctacgtggactggatccgttccacgctgcgccgtgtggaggccaagggccgcccctgaaccgcccctcccacagcgctggccgggaccccgagcctggctccaaaccctcgaggcggatctttggacagaagcagctcttccccgaacactgtggcgtccgggacggccccacccgtccccccacactccctcccacggggctccgggagacaggccggccctgcacctcaccccaccgtgacctcaataaacgttgaaactccccctggctcctgtctgtccttcccatatagggaggggagggggaactgcccaccgtgacctcaataaacgttgaaactccccctggctcctgtctgtccttcccatatagggagggaaccagggagaggtcccctgggttcaagtccccgagccccaaactcaggatggggggagtcggagcgggggatgggggcccaggttgcagggggtctctctcctggatgctcgtggctgtgggttctaacccggccccatcagggtggccctgggcaggttgttattcatctccgtgcctcagtttcctcatctggaaaatggactcgccccagacgtttcctagaactgtccctgctggctcagggactccttgaggaaggggatggggatggggaagcagcctggggggcttcctggaggaggtggcagtgccagagctgcatatcaaggtgtgaacagaaacatccgaagggctgccaggcagggggcacagtccaggcagagacctgagggctagaggccaggggacggggaggagggcaggcaggggagggatgtgggtgcaggggaggggtaatggggttggagcgctatttctcgtaggaggggtaggcagggcaggagttccctggtagaagcatgagcaatgaactgggtgggggggtggccagaggggaggtccgaggcggggaagaggtgggactcacagtccagctcaaagacgggcaagtggccactagaaggaggcattagccacagagaggggacgacctgctccaggacacgtgtagagaagaaatgaagctcattgctggtgttttttttttctttttaatatttttttgagacagagtctcgctctgtcacccaggctggagtgcagtggtgtgatctcggctcactgcaagctccgccacccgggttgaagcgattctcctgcctcagcctccggagtagctgggactacaggcacagaccaccacgcccagttaatttttatatttttagtacagacagggtttcaccacgttgtccaggctggtctcgaactcctgacctcaggtggtccacccgcctcagcttcccaaagtgctgggtttacaggcgtgagcctacttacttatttacagctggcctacttatttatttttgagacagggtctcactctgtcgcccagtctgtagtgcagtggtgcaatcttggcttaccgcagcctcaacctcctgggctcaagtgatcctcccacctcagcctcccgagtagctgggactacaggtgccaccacacccagctattttcttagtttttgtagagacggggtctggctgtgttgcccaggtgggtcctcagtgactctttacatatgaacacctccaggtcactgtaatcttagcaatctcctggcctcccagaagaccccacgtccccctcggagtctacacccgctgtgaccataacacccctaccttccctgccacagttaatggtgaaccagctct[137 bp omitted]tgcctcagtctcccgagtagccgggattacaggcaggtaccaccacgccaggctaattttgtatttttggtagagacggggtttgtccatgttggtcaggctggaattcccaacctcaggtgatacacccgcctcagcctcccaaagtgttgggattacaggcctgagccaccgcgcccggccagacaacactttcttagctaagaactttatgaacgtgaatttatttcatcctcttgacaggtttatgtgatggatcctacgattataattttacagaggaggaaactgagtcacggagagtttatttcaggggcctgaagttacacagtggccaaatggccacaccagaaccaggatatgaacccagcgtcggcacacttaataatgactgcacgtgagaatgtagtatacagctggtgctcaataaatgcagctgacgccaagtctgatctccgtgctggaggccaagccccttccaaagatacggcgtcccccacccctgaaatccccccacccccgacttgaaacagggctgtgtagacagtaggcgcttactaagtgcactgtggtgatgttaaggcagcaaggtgggaaccctgccaaaaggggaggggagaaggcagggtagtgtgtgtctgattaagctgaggacagggcagacatggactgagcgcctgctgtgtgccaggctctgggagggcagggccattgtctccctaacccgagagccatgggggtccacttgcctgtggtcacgtcaggactccagcctggcccaggctctgcgtgtccccgggtgccctcgccccgcctattcctggagacaggcccgttggttcccttcccctccccttgtcctggagccaggaggacgttggttcttgcgacagccttggcccggccgttgcagctggaacatcgtgggggagatgggaagaggaacggggcccggagcccggggctgggtcctgggaatccctttcccgcagctgggactccagctcccctgccagttcctccaggcggaagccctcaggcttggtcctcactccagcctcccggcctggacaggaattctctctccagcagccctgccagatgcccgcccagcccctgcctcaggcggggagggcttcagggaagctcaccaaggcagaagggcgggagagattgtcagagccccagctggtgtccagggactgaccgtgagcctgggtgaaagtgagttccccgttggaggcaacagacgaggagaggatggaaggcctggcccccaagaatgagccctgaggttcagggagcggctggagtgagccggccccagatctccgtccagctgcgggtcccagaggcctgggttacactcgcagctcctgggggaggcccttgacgtgcctcagttcccaaacaggaaccctgggaaggaccagagaagtgcctattgcgcagtgagtgcccgacacagctgcatgtggccggtatcacagggccctgggtaaactgaggcaggcgacacagctgcatgtggccggtatcacagggccctgggtaaactgaggcaggcgacacagctgcatgtggccggtatcacagggccctgggtaaactgaggcaggcgacacagctgcatgtggccgtatcacagggccctgggtaaactgaggcaggtgacacagctgcatgtggccggtatcacggggccctggataaacagaggcaggcgacacagctgcatgtggccggtatcacggggccctgggtaaactgaggcaggcgaggccacccccatcaagtccctcaggtctaggtttggcaggtttggcaaaaacacagcaacgctcggttaaatctgaatttcgggtaagtatatcctgggcctcattt[134 bp omitted]gaggcaggcggatcacccgaggtcagatgttcaagaccagcctggccgacagggcgaaacactgtctctactacaaatacaaaaattagccgggagtggtggcaggtgcctgtaatctcagctattcaggaggctgaggcaggagaatcacttgaacctgggaggcggaggttgccgtgagccgggatcacgccaccgcactccagcctgggcgatagagcaagactctgtctccaaaaaaataaattaaaaaacccacattgattatctgacatttgaatgcgattgtgcatcctgaattttgtctggaggccccacccgagccaatccagcgtcttgtcccccttctcccccttttcatcaacgccctgtgccaggggagaggaagtggagggcgctggccggccgtggggcaatgcaacggcctcccagcacagggctataagaggagccgggcgggcacggaggggcagagaccccggagccccagccccaccatgaccctcggccgccgactcgcgtgtcttttcctcgcctgtgtcctgccggccttgctgctggggggtgagtttttgagtccaacctcccgctgctccctctgtcccgggttctgttcccacctctccatagagggccccaccagtgtgggtccctcatcctcacaggggaggtgccagctgggacaaggagaccagaagagactgaggttctgagcggtgaagccaccaccaggagcccagagttggggtttgaaaaccggggagggggggggggtcgcaggtcgccctctgggttcaagtccaggtctgtctgtgccttggaggggcaccgtggggaggtccctttgcctctccgtgcctcagtttcctcatctgaacaacaggggtgcgaacggccccgatcccgtgggttcccggtgggggatcccgtgggttcccggtgggggatcccgtgggttcctggtgggggatccagaggccccgtggccgggaggggacaggctccttggcaggcactcagcacccgcacccggtgtgtccccaggcaccgcgctggcctcggagattgtggggggccggcgagcgcggccccacgcgtggcccttcatggtgtccctgcagctgcgcggaggccacttctgcggcgccaccctgattgcgcccaacttcgtcatgtcggccgcgcactgcgtggcgaatgtgtgagtagccgggagtgtgcgcgcccggctcggaccccgcgtcccggtctgtgaggtgggtggggggaggccggggccggggctgctggcgggggggggtccgtccagggcccgcggggcccctcgagcaccttcgccctcaggcccgtcgccggatggggacgacaaggcgcggctgagccccgacccccggggccgcccctgagccccgcctctccctccccggcagaaacgtccgcgcggtgcgggtggtcctgggagcccataacctctcgcggcgggagcccacccggcaggtgttcgccgtgcagcgcatcttcgaaaacggctacgaccccgtaaacttgctcaacgacatcgtgattctccaggtgccgccgggcggggcggggggcgcaggggcggaggccagaggcctggggagggtggaggctgcgacggaggggcgcgtcggggccgctcgtggggacctggggtggcatcgtgggctgggtggtcccctctccgcgcctcggtctgcacctctgtgaaacgggaaaatacccgccatgggccgttgaggggttaaatgagatcctgcagggaggccccgatctgctgtcaatcaacaaacttactgagaagggaggccccgatctgttgtcaatcaacaaacttactgagaagggaggccccgatctgttgtcaatcaacaaacttactgagaagggaggccccgatctgctgtcaatcaacaaacttactgagaagggaggccccgatctgttgtcaatcaacaaacttactgagaagggaggccccgatctgctgtcaatcaacaaacttactgagaagggaggccccgatctgttgtcaatcaacaaacttactgagaagggaggccccgatctgctgtcaatcaacaaacttactgagaagggaggccccgatctgttgtcaatcaacaaacttactgagaagggaggccccgatctgctgtcaatcaacaaacttactgagattctttgtgtctctccattcaccagtcctgtggcccagggcaggggccgcctctgtctttgggaaaaggggcaaaagtccccacctttccacccctgtccgcggcttgcagttctggttatttcctgggcgccgggccccgtggctcaggcctgtcatcccagcactttgggaggctgaggcgggtggatcacgaggtcaggtgttcgagaccagcctgagcaacatagtgaaaccccgtctctactaaaatacaaaaaaaaaaaattagccgagtgtggttgtgggtgcctgtaatgccaactactcaggaggctgaggaaggagaatcgcttgaaccccggaggcggagattgcagtgagctgagatcacaccactgcactccagcctgggtctcaaaaaaaaaaaaaaagattcctccctgggaagggttagagggagagtttccttgtcactaagttttctcatagctctcacccagtgcagtggcgcgatcgcagctcactacagcctccatctcctgggctcaagccaccctctcagcttggaatggggggtagctggaaccacaggtgccaccacgtgggtccaccacgtctggctaatatatatatatacacacacacatacatatattataaataataaatatatattttatttaaataaaatatataatatttataattattttataattataataatatttatataattataaatatcatttataattataatatttattattttataaaataataaatataaaatatataaaaatatttttataaaataataaaaatatatatatacacacatatatatatattttttgagacaagtctcgctctgtcgcccaggctggagcgcagtggcacaatctcagctcactgcaacctccgcctcccaggttcaagcgattctcctgcctcagcctcccaggtagctgggactacaggcgcccgccaccacgcctggctaatttttggtattgttagtagagacggggtttaaccatgttagccaggatggtcttgatctcctgaccttttgattggcccacctcagcctcccaaaatgctgggattataggcgtgagccaccgcacctggcaatttttttttattatttttgtagacatggggctttgccacattgcccaggctggtcttgaatgcctggcctcaagtgatcctcctgcctcgccctcccaaagtgctgggcttacaagcatgagccaccgcgcccggctgtagtttttttgttaactgagcacctactgcttcctgcactcaagccacatccagggacaacctccaacgccctgagccttggtgacggctcccactctacagatggggaaaccgaggcttgccttggggagcagagtgtggggtgggtatcctgccctgcaggatcccagaaccacagtggaacctgagatggggaaactgaggcccggagaggggagggtcatcatcactgccccgtgtgacgcgctgacgatctgtccccaccgccacagctcaacgggtcggccaccatcaacgccaacgtgcaggtggcccagctgccggctcagggacgccgcctgggcaacggggtgcagtgcctggccatgggctggggccttctgggcaggaaccgtgggatcgccagcgtcctgcaggagctcaacgtgacggtggtgacgtccctctgccgtcgcagcaacgtctgcactctcgtgaggggccggcaggccggcgtctgtttcgtacgtgccctgggtgtccctctgctccccacccgctcccagcccggactgcagcaacaggcaccgtggctagaccctaggagggacttcccaaccctgacaggcggcgggcaggtgggcagggcctcgcagtccagcttccccaccttgtctgcctccacagggggactccggcagccccttggtctgcaacgggctaatccacggaattgcctccttcgtccggggaggctgcgcctcagggctctaccccgatgcctttgccccggtggcacagtttgtaaactggatcgactctatcatccaacgctccgaggacaacccctgtccccacccccgggacccggacccggccagcaggacccactgagaagggctgcccgggtcacctcagctgcccacacccacactctccagcatctggcacaataaacattctctgttttgtagaatgtgtttgatgctccttggctgtgtgattgggtgttgaaaatggtcagtaggtcgggcgtggtggctcacacctgtaatcccagcactttgggaggttgaggcaggcggatcacttgagctcaggagttcaagaccagcctgggcaacatggcaaaacccccgctccattaaaaaaaaataaataaataaaataaaataaaataaaatggtccaagcctggcccagtggcttacgcctgcaatcccagcactttgggaggccgaggctggcagatcacctgaggtcgggagttcaagactagtctgccaacgtggtgaaaccccatctctactataaatacaaaaaaaattagcttggcgtcgtggcgcgtgggaggctgaggcaggagaatcgcttgaacctgcgaggcgaaggctgtagtgagccgagattacgccactgcactccagcctgggcaacacagagagactccgtctcaaaaaaaaaaaaaaaaaaaaaaaataccggtgcggtggctcgtgcctgtaatcccagctctttgggaggcccaggcaggcggatcatctgaggtctaaagttcgagaccagcctgaccaacatggagaaaccccatatctactaaaaatacaaaattagccgggcgtggtggtgcatgcctgtaatcccagctactcgggaagcctgaggcaggagaatcacctgaattctggaaggtggaggttgcagtgagccaagatcgctccattgcactccagcctgggcaacaagagcgaaactccatctcaaaaataaataaataaataaataaataaataaataaataaataaataaatataaataataatgataataataataataaacaacaaactagaatccagagtctcttgggcatctctggagtaagccaccaccagggggcagcacagccagggcaatgga[277 bp omitted]gacctcccaaagtgctgggattacaggcgtagccaccacgcccagccctgttgttatatcattttcta[132 bp omitted]caaaaccctgtctctactaaaaatacaaaaagttagcccagtgtggttgctcatgcgtgtaatcccagctactcgggaagctgaggcagtagaatcgcttgaacccgggaggtggaggtcgcagtgagccgagattgtgccactgcactccagcctggacgacagagcaagactctgtcgcaaaaaaaaaaaaaaagcaagaaagaaagaaaaaaagaaggaaagagaaagaaagaaagaaaaagaaagggaaagaaagagaaaaacagagaaaggaaggaaggaaatgaggctaggcgtggtggctcacacctgtaatctcagcactttgggaggccgaggcaggcggatcacgaggtcgggagatcgagaccatcctggctaacacggtgaaacccatctctactaaaaatacaaaaaattatccgggcgtggtggcggacgcctgtagtcccagctactccggaggc[144 bp omitted]gtgaagagaaaagccgggggaacctcgtgtgctgctccccctggggacaatgtctgaggtcctccccacaaggtatccccatccttctggtccccgcaccatggattaatgcaacgtgaatcccgctggcccctgtggggcagatgtgaaaaatggagctacaccatgagcaggcctgcagtcccagcacttctggaggctgaggtgggaggatcacttgagccccggaggtcgaggaggctgcagtgagctatgattgcaccgctgcactcgagcctggatgaaagagcaagaccctgtctgtaataaaacaaaaacaacacacacaaatccccacctcacaaaaggccctatggcccagattctgagaagtattttattttaatttttttgtagagatggggtctcgccgtcttccccaagctggccttgaattcctgggctcaagagatgctcctatctgggtctctcaatgtgccgggatggtaggtgggagccactgtgcccggccagccctgactctgttcatcagaacctgccctcagtgaacagtttgggagggggcgtgtgatccaggctccaccaacccaaggcacccttgagacttggctggagtgaggaagaattttaggaggggcccactgagccactgggttgagtgtggggtccctggaaacacaccaggggaggctggtgaggaaagaagccatcagagaagaaaggagaagccagaagcagacactggacattgttcaggcacctggatcaagccacacctgaaggcggacatccctgaactttccatataactttcatgattcaggctccacccagtttgtctgggttttcctgtcccttgtagccagtcttcccagctgcctctgccttggcctttccaactttctattcgtcagggtgtcaagccccagaggccacagggacagagacaaaggtgtcaagtgaccttcctacccccaacagaccttctctctaatatagaggaggaaaagaagggagggtagcaggacaagaaagtgggttgtttacacgctgtggcctccagctaggattgtgaaacaccctgggggactctgggtgtggtgaagttggggccggggtgggtgcagcccccctctctgcctcctgcccatctgagggactgccccccaccagggccagcaggctgtcaggctcacagaggcccgagggtctcccagcgacttgtcgactctggtgtgagtctggcaggaggtaacccagtcccggggagggcggaggctgggcgggcgagttcccctttccccagctgggccgctgcccacccggggagcggcccgccccctccaccctcataaaagcacccccagggccctgcctgggtcagtgtctcagccacagcggcttcaccatgcacagctgggagcgcctggcagttctggtcctcctaggagcggccgcctgcggtgaggaggcctgggcctggggtgagggacagggctgtgtaggggcgtggtgctcccttccgtcacacggacggtcctccagcccctccaggtgggcaggaagggggtgtctctcctcactaatggaaggctctgaacgctgaaaaattctagaaaattcagattggaaatcggaactttctggagtcagcttttcttgcagacagagtctgaacgtctgcgtggaaaacttcatctgcgtggctgactgggctggcccaggcactggctgggtcagccccatttctcttatgtccaactggaaggcactgcgcccagggtagggcgctgggatctgcccccggtccccagcccactgtgggttctgtactctggggcattcccgcccgagggtatctgagtttgcaacgctgaggggccccaagacggaaacgggattcttttttttctttctttttttttttgatagggagtctcgctctgtcgtccaggctggagtgcagtggtgcgatctcggctcactgcaaactccgactcccgggttcaagcgattctcctgcctcagccttccgaatagctgagattataggccacgccgactaaattttgtatttttttttaaagtagagacggggtttcaccatattggccaggctggtcttgaactcct[133 bp omitted]atcccgtcaggcagcctcgcccgggggaggagtccaccccgcggccctcacgcgcccgcccacccacagcggcgccgccccgtggtcggatcctgggcggcagagaggccgaggcgcacgcgcggccctacatggcgtcggtgcagctgaacggcgcgcacctgtgcggcggcgtcctggtggcggagcagtgggtgctgagcgcggcgcactgcctggaggacgcgtgagtgcccgcgccgcgcgggggaagagcccgggtgcggtggggggagtcggctggcaccgaccgcggactccgtccggtccccagggccgacgggaaggtgcaggttctcctgggcgcgcactccctgtcgcagccggagccctccaagcgcctgtacgacgtgctccgcgcagtgccccacccggacagccagcccgacaccatcgaccacgacctcctgctgctacaggtcggccccgtgtagcgcagtccctcctgcggcgctgggatccccggcccaccctcactccaccccgcctacaccgcgccccgggtccagcctcgacctctcctgctgcatggggaccccgccccacaacccccacaccctcaccccgggtctagcctcgacctctcttgctgcgctcggagcccccccaccctctgcaccctcaccccgggtccagcctcgaactctcctgctgcatggggaccccgccccacaacccccacaccctcaccccgggtctagcctcgacctctcttgctgcgctcggagcccccccaccccctgcaccctcaccccgggtccagcctcgacctctcctgctgcatggggaccccgccctacaacccccgcaccctcaccccgggtctagcctcgacctctgcggctgcactgggagccccccaccccccgctccccctgcatccccatcccggttccagcctcgacctttgcagctgcactggtgagcctcgcacccaccccatccccacctgcacccccacccagggtctagcctaaatctctcctgctgcactgagacccacgcccctgccctgatgcccacctcccccgtcccgtctccccgagcctagcggcattctccccagcctcgcacccccgcaccccaaccctgacgtccgcctccaccctcagctgtcggagaaggccacactgggccctgctgtgcgccccctgccctggcagcgcgtggaccgcgacgtggcaccgggaactctctgcgacgtggccggctggggcatagtcaaccacgcgggccgccgcccggacagcctgcagcacgtgctcttgccagtgctggaccgcgccacctgcaaccggcgcacgcaccacgacggcgccatcaccgagcgcttgatgtgcgcggagagcaatcgccgggacagctgcaaggtgagccttcaggcctgggaggagacgcggggcctgcaggccccgggaagggcctgcagagggagcgcgaagcggggggcaagtaggaacagggcccagggaaggggcggggcgcgtagggggcgggaactggaagatgggcggagcatgagggtggcccgtgggcggggcctgtatgagggggcggggcatgtgggtagggtggggccttgggggcgaggcctggagaaggtacggggcctctggagagggtggggctgaagaagggtcagggcgggcagaaagggcaggaacgggtgggatgtggaaggacctgtgggttagggtgggaatagggggcggggctcgaggagggggcggagtccagtaatagcgggactgcaagggggcgaggccaggaagagggttggggcatgaggggcagggcatggaggaaggggcggtacctgtggggagggtggggctggagaagggtcagggcgggcaaaagggcaggtggcagagaaagggtgggaggtatagggggcgggcacgtggaggaaggggcggggcatggggacggggcggggcaggtggaaggggcgggaacctctgaaggggcagggctggtgcggagcgggatccctgctgtggcagggaagagaaggggtcctgagcagggcagaggtttaagaccagccgaggcttgcatggtagccggggccaagattgggtggggcttaagggaggggcgtggcctgaggtgagtggggactgagcagagcaggtggccactgagacgcgttagggcagaagtgggatccacggcaagtcaaagcttggaagagcaggaatgaggtgtgggacccccatactggaaagggcttggagcggggtggggtcgggggaacacgtggtgaggttgaggccagagggggtgtggccaggagctgggggcgggcctagaggggcgtggcttgtggttgtggcctaggcgataggcgtggcgcggggctattgactagtgaagaccaaattaacacgggagggatgagcgagcattgtggggcgggagcggcagccaggtgagggggtctaacacgtgaggccggggtgggcgcgggccgcccctcacggccccgtcctgttccggcagggtgactccgggggcccgctggtgtgcgggggcgtgctcgagggcgtggtcacctcgggctcgcgcgtttgcggcaaccgcaagaagcccgggatctacacccgcgtggcgagctatgcggcctggatcgacagcgtcctggcctagggtgccggggcctgaaggtcagggtcacccaagcaacaaagtcccgagcaatgaagtcatccactcctgcatctggttggtctttattgagcacctactatatgcagaaggggaggccgaggtgggaggatcattggatctcaggagttcgagatcagcatgggccacgtagcgcgactccatctctacaaataaataaaaaattagctgggcaattggcgggcatggaggtgggtgcttgtagttccagctactcaggaggctgaggtgggaggatgacttgaacgcaggaggctgaggctgcagtgagttgtgattgcaccactgccctccagcctgggcaa[146 bp omitted]accccgtgtctactaaaaatacaaaaaaaaattagctgagcgtggtggtgggcacctgtagccccagctactcaggaggctgaggcaggaggatagcttgaacccgggaggcggaggttgcagtgagctgagatcgcaccactgtactccgacctgggtgacagagcgagactctgtctcaaaacaaaaacagaaacattaaaaaaagaggaacgcgggaagctacagataaaagcgcaagaacggagaatacagcgaagttccgggtccagcgcttccgtggggctgacgcggccacacggcggcgcccttgccacacacacacacacacacgcgcgaaggcccgccaggcatgggtgtcccctcctggtctggctcataccgtttccctttgcttaccaaggggaatgtgagcgtcttctgtgtgcaaggctgtgggctgagactcaggtgcacagaaacccttcgaggccgtgttcctatgacccatatcccataaggggaaactgaggctcacagggactgtgcgactctcctgaccttacacagaagctccaggacacagcctggactggagcccagagccacggagcctgccttcacaaaccaccctgggtgcggccagacccacaccaggacgacgagcagcggcacctgcttgctggaggccctggacctcaggtcacccttcttggcaaggccagggaggacacctgaggccctgtgccctttctcccacctggtggaggggca[136 bp omitted]cccatctccactaaaaatacaaaaaaattagccgggcgtggtggcggatgcctgtagtcccagctacttgggaggctgaggcaggagaatagcttgaatccaggaggtgaagcttgcagtgagccgagatagcaccactgcatttcaacctgggcaacagaaggagactccatctcaaaaagaaagaaaaaaaaaaaaaagagaaaagaaaaagtgactgatgggccgggtgccggtg[168 bp omitted]gaggcagaatggcgtgaacccgggaggtggaggttgcagtgagtggagatcacaccactacactgcagcctgggtgacagagcgagattccatctcaaaaaaaaaaaaaagactgatgatctgagaggcaggtccgctgggaaaaggggggatggattgatgaacactgtgcttgggtgtttttggggctatggaacactcacctaggaatcacactgacgtgcaagcacgtattgagcacttactgtgtgcagagccctgggccgggcacggtaagacacatctaagccccagccctgctcttaggaatttggtaaatactgcactgcacggaagggggcccattcagccgtctggtgaccaccacgaagttggagctcactgtgtgaatttcacgtttttgtttttgttgtttttgagacggagtctctctcgtcgcccaggctggagtgcaatggcacgatctcggctcactgcaacctctgcctgatggttcaagcgattctcctgcctcagcctcccgagtagctgggattacaggcatgcgccaccacgcccggctaattttgcatttttagtagagacggggtttctccatgttggtcaggctggtctcgaacttccgacctcaggtgatccgccccccctcggcctcccaaagtgctggagttacaggcatgagccacctcgcctggccacccagctaatttttaagatttttgtagagatgaggtctcgccatgttgccccaggttggtcttgaactcccaggctcaagtgatcctcctgcctgggtctcttatggtgctggtgcgtgagctgctgcatccggcctgcctgggcatctttgcatcctttggtccgcaggagctacggagggttccggaggaggagacggtttaggaggcggtggaacaggagtggtggggaggatgcaggacgggaacatctgggcaccacatagtcctctgagttgagacgcggtccagtctccgcactgccatatatatggcctctgtttcctcatctgtatctcggggccccaacgtccctggctcttagggagattttgaggacccctgggggaaccgcgaggcgacgaggaccttgggaagccgggggcggggacagcagagcttcagggccacaggccgcctctcagcacccccatgccctgcctgcctcgcccaccccactgtacctgagtgaggtagaagctcatgacagccagcttgtgacagtggtctgacagaccccccccccacctagtgacgcaaagcccaccccggctcaagtggtcaggaactgatgggaccagggggcatcctgtccccactccacgcgtccagacctcagccaggtcaccagaaccacggggggctggggtcagctagaggcattttcacttctgagtcgggcactgggtgactctgatctcccggcccctgaagctgcccacgagcctgcgtcccacaacgcatgggcaccctcaccagtgctcccatctcctccccgtccacccgccgcaggcctgcacccctcgccagcgctcccatctcctccccgtccacccgccgcgggcctgcacccctcgccagcgctcccatgtcctccccgtccacccgccgcgggcctgcacccctcgccagcgctcccatgtcctccccgtccacccgccgcgggcctgcacccctcgccagcgctcccatctcctccccgtccacccgccgcgggcctgcacccctcaccagcgctcccatgtcctccccgtccacccgccgcgggcccgcacccctcaccagcgctcccatctcctctccgtccgcccactgcgggcccgcacccctcgccagcgctcccatctcctctccgtccacccactgcgggcccgcacccctcgccagcgctcccatctcctctccgtccacccactgcgggcccgcacccctcgccagcgctcctgcactctggtctctgcagagccacatggaaacgccgcagacacccggacaaaagccgcccccaaccacccgccagggcccactgtgttctgtctgtcacttgctttggacacccctggcatccacaaggcgccccacacatgctgagtgactgggggagatggaggcccacacactcctgagctcgagaggaggtcgcaggagtggggccgggagctgccctagggtctgtccctcagaggatggccagggggacggtgagacggggctcggtgtcccagcagagcttggagtctgcggccgaggacgggggccttaaagtgggggggccttaaagtgggggggccttaaagtgggagtgcctcagccaggtgacggggtgcctgagctcccgcctcgcgagccggcactgggcactcaccccaccctcgctgccctccccagagctgcagaaaggaggagtccgtcggcacacagcaggggcaccactgtgctgggaaggcctgctggagacggaaggcgggacccctggggacagcaacagaaacggcagaaacttggcccaggggctaagcaacctccagcagagagcagctggagaaacataacagggacagagtcaggcagagacacagaaacagcatgcagagacacagagaccatacacagagaagtgcagagataccagagacacgcagaaacaaggagagcacgcagagacagtatagagacaggcagacaacacactgaaaggcagatgcctggacagaagccaccctgacgatggccgccccatcccatccaccggcctgctgtgtcctgtccccactgctcactttggatacccccagactcggcatccactaggtgccccataaatgctgaaggatttaaagacaggccaagaggacacaggctcccggcaccaaatcgaggtcgtgggtggggtcgggggcaccgacggcagggacgcgggcctgggcgcagagggcgtttattggacctgtccttcccagccgctgcttgtccaggttcagcgctctccgcgggtgaggcaaggaaaccgaggagacgcccgagccgggtcaccacaaggtccgcctggacccccggccgtcacggacggtcctctggatgcagatggtccagggatctgggggtcctgggagagtggtgtgtggactgcgggcccagctggacaaaggcaggggcttcctcagaagctctgctggtcacgcaggcgtccggcccacggccttcaacagccctgcagggcgggctgaggttaaccgcgccgaggagagtccagggcgagcggtggctcttgcagcagccgggctcaggggcagctgaggggtagctgaggagtagctgaggggcagctgggctcaggggtagctgaggggcacccgccaccagagcccaccgcacaggcagttcttgatccagcgctgctcccactgcttcaccgccgtggttctgttgggcgacttgagcatggtgacacagccgcacctgcggggaggcaggcactgagcgggttcccacttccaggcgggcctcccttacgcctgccccacttttgcttccaggcaggtctccctctgctcgccgtccctcacgcctgctccccacgtccccacctgccacagggcctctgcccatgcttctcctccccccagcaatgctgctccctgaactagccccgccacaccaagttaactgctccacatcctgggatcctggctccaacactccctctgggacgtgctccctccaccacccttgaccgtctggagcgctgggtgggggctagaatcagctgagccatccccagcggcacatctctgggagtcagcggttccgggggcccctcacctggtgcaggccttgcattcctccgtggggcaagcgccaaggtgcagcctccgcaggtggtcgatcttgggctggcctggggccctggcgggagaggggagaacgtgagggaggcctgggcaccacgaggccaggttccggcaggggcatctgtccacaggcgggggtggagggaatggccggcctcacaccatctgccaggtgggcccagatgtctgtgaacagtgaggtgggaggtgcgggaccacctgagacaggcccagtaaagggggcgggaccccccacacggaggagggttggtctcccaggtgcctggggagcttgaggcttagagacccagtaaaggggacggggcccacacagggacgagggtcggtccgccacgtgcccggggagcctgaggtgcagggaaggtgcttgtgacgctcccatttgaggctggacagaagcaggtacatggggacttccacaccacctctgcccagacacccggcctggaggtgccgggacctctgaacgacaagattctggtggcaaaagctgccctcggtggtgggtgggggacctgggtctgggtgggggtgggccggcttattctgctctcattaaatatctgaaattttcccagtttacaagcctctgacgtaaccgtcctctctttccatcaagtcttttcctgaaacccaaaccctcgtgtgtgactcattaggaggcccctcccacagtgagcacgaggaagaaaatgctggaggtcctagagccaagccagggcgccttcccggaggtcccggagccaagccgggggtgccttccctggaggtcctggagccgagccggggccttccccggagcagggctgctggaggttcacttcattttcttccttttgctcatctgtgttttctaaaattccagccctgagcaatcagtggctcagagggtttgcatgtgctccttgtcaaacgtgtgtctgaaacaggctgggggtctgacgggcctgggttcaaatcctgactcggccacttcctgaccgcgtgaccccagatgagtggggtgacaaggtcccaccctttccaggctgggtttcctcaccgtgaaatggggtgacaaggtcccacctcacagggctgctgggcagccagggtcagctcagcacacttgggttgcccaaaccccgcacattccagagaaaggccagccccgggccctgcaaggtgacctcttgcccccgggagatcctcctgatgaggtgtctgctcagcagggccctgggccatatgctaaggcgtctctctccatccacagagggatctacggcgaggcctgacatccaggggggccagagactaagggcagaggctaaggcagggcgccctgtacagcgaggccaacacacaatcaggaaacaccaaggcaaggccggggcggtggctcacacctgtaatcccagcactttgggagggcgaggcaggtggatcacctgaggtcaggagttcaagaccagcctggccaacattgcaaaaccgcctctataccaaaaatacaaaaaatacctaggtgtggtggctcatgcctgtaatcccagctactgggaaggctgaggtaggagaatcatttgaacccgagaggcagacgttgcagtgggccaagacggcactactgcactccagcctgggcaacagagtgagaccctgtcggggagacaaaaaaaaaaaaaaaaagggagagggtgaatggaagggctgggtgcccgtgttgggggtggttcgtgacacagcagaagacaccactaggggatggagttaggggcacctagaaggaagcagcagtcatggccatgactggagaacatggagggaaggagccgtatggattcgggggggtcctggggcaggacatggagggagggagccgtgtggattcggggggacccggggcaggacatggagggagggagccgtgtggattcggggggtcccggggcaggacatggagggagggagccgtgtggattcggggggtcccgggcaggacatggaggcggggagccgtgtggattcggggggacctggggcaggacatgcagggagggagccgtgtggattcgggggtcccggggcaggacacggaggaaggagtcctgtgtttggggaccaatgcagggacacacgcacctggcgaggccgtcgagctgcagggtggcagcactgccaggcagcgtgggcgcccggccaaactgcagacgaaggggctgcttgggctgcaggcggctaaccaggccgtcgctggctggcagccagtccaggctggggataagcagctggctgggcagcaggcagcattcatccaccagcgcctcgtccggctcgctcgctgggccctcatcgcgacctgcggagagaggtggcggaagtctcagcacccctgactggggcaccgcccggccacccgggacgtgctgggagcccctccagttcaggagcaccaggtcagggccccagctctgtctgcctggctgggtgaccccggggttctctcaccaggtcggggccccggctctgcctgcctggctgggtgaccccagagttctctccccgtctctggcctgtcatgagactccctcattcacttaaaaagtatgtgggaagcactgtgccttttccagacactgggatgtaagaatgacacagctcaccctcctcacatacacacaacccgacaaggagagacagcaaacaggtgcctggaagtggctgccatcccaaaagcacccacacagagcatggacctgtgctaggaactggggaaatagcagatatcaaggcagagccactgccacctgcaggggcttatgttctggcggggggctcaggcaggacttgtgttttggtagggagaggggagcggggagaggggagaggggagagcggggagaagggagagcggggagaggggagagcggggagaggggagagcggggagaggggagagcggggagcggggagcggggagaggggagagcggggagcggggagaggggaggggcgggcgggggtgcctcacagcagatccagagcttggtgagcaggcggaagagcagggacatgctgtcctgggtatccgaggtggccgtatacacgggcaggcagctgggcttcagaaggccccagatgcggatgaccaccatcaattcccgaagcatgcccagcgaggtgccgtcccgcagaaagctgtggcccggcctcagcagggaaccctgcccgaaagaggcatcggtgtggctggggcggcggggggcagatggcgatgggatgaagtgtcttggggtcggtggaaccccgaccggggggcaatgggcagggtctgggacatttgtggtggtcaggactggggtgcttctggcaccgagtgggtggatgccggggacgctgctcagagccctgcagggcccaggacagccccatttgcagagtcgtcccatccctgagagtccacaagactaagacgaggctctggctgaggccaatatccccacctgcacgtggaggagcagccgccccctcctacagctgcgggcccgggcccctggtgactgtactgggagctgagaggaccagggaagggaggccccaggggtggcccctggcagcctaaagccccacaaaaagaagagagggacttcaaaccgtccgtgatgggcgcggtggagaagggcgggccccagggcaggatgaagccgggtgggtggggcagaagaaatcacagctggggcaggacagagtgtaccggcgggggggtgggggcgaggttggagccctggtcaggggcgcacaagccgcagaactgaaggtggaggtgtggatggagacttgatttcaaggccgcccaccccaggcgcagggagctggggagggtaaggggtgggggcagcagcagcagaagcaaggcgaaccggccttcgtgtaggggtggggctgagaaggagcagggcctgggaggcggggctttgagaatgggcaggaagggtgtggccaaggaaaggcttcttacagcagaggcttcatggagaggagggctccgaggtgggggagggctccgaggtggggcagggctccgaggtgggggagggctccgaggtgggggagggctccgaggtggggcagggctccgaggtggggcagggctccgaggtggggcagggctccgaggtgggggagggctccgaggtgggggagggctccgaggtggggcagggctccgagatggggcagggctccgaggtggggcagggctaggaagtggggcagggctaggaagtggggcagggctaggaagtgggggtttaagaagagacagactcaggaagtgggactccaagtaggggtgggactccaaccaggggcggggctgaggtgggactccaagcaggggcgggactccaagtaggggcgggactccaagtaggggcgggactccaactaggggcggggctgaggtggttttgaggggcaggggcagggaagcggggtcctgatgagatgggggcccaggtggggggcggggccttaggggagagcatggcgcacctggttgggtaggctggccagcaggtacagcacgaagtcgcccacccactgcaagagctgctgcagcgcctgcagtgtgttcatgtccagcacaaattcctccgtcttgaggttgatcatgaccttgtcaatgtctacaaggagacgtgggtcgggtcagctcgggcctcttgtacacacagggtgacctaactgcacccctcggtccttcgacctgcactgagtgcccacccagtaccaggacacaaggggacccacaccgggaacgagaagggggcgatggcgttgccggacggagaggaactgggagcccactgcctgcccccccccgggggccgctgtgctcagcaccaaccagcttctctcggcctgcaggccttggcgtgggcaggtccccatgccagggccaccagtgctcaggcccggcctgctggtgcacatctgccccctgctccgaggtgaactctgtgaacacaggggcatgtccacagcgtgcagctgcagccacccccggctggcagctggcggcggttacacacccaacagatgcctctcggatggtgactagggtggtcccacagaactaaccatgactgtgcacacggctcccagctaccaggagtgccacgtgtccacactcaaccgggtactccagacaaacgataaccctaaattttttttttgagacagagtctcactctgtcgcccaggctggagtgcagtggggtgatctcagctcactgcaagctccgcctcccgggttcacgccattctcctgcctc[133 bp omitted]ggcctcccaaagtgctgggattacacacgagtcgccacgcccagcaaccctaatttttaaaagaaacagcctgccaggcacagtggctcacgcctgtaatcccagcgctttgggaggcagaggcgagtaggacaccacgtgctgggtgagcctgggcaagctgcttagcctttctgcctcagtccccttacggcaaaacggaaggaggagcagacctgcctgcacaggacccgggtgccgggtgtcggcctgggagcgtctcagcccccaggagtagagagaggtgaaaggatcgcttgagctcaggtggtcaagaccagcctgggcaacacagtgagaccctgttgctacaaaaaattaaaaaccgggtgtggtggcacgtgtctgtaatcccagctactccagaggctgaggcgagattgcttgagcccagaaggcagaggctgcgctgagctgggactgcgtcaccgtgctgcaacctggatgacacagtgagaccgtctctaaaagcctgggtgtggtgtaatcccagcctttaggctatatcccagcactttaggaggccg[135 bp omitted]gaggcaggagaatcacttgaaccagagaggcggaggctgcagtgagctgagatcgcaccactgcactccagcctgggcaacagagtaagaccctatctcaaaagagtaaaaaaaataaataaaaataaaataaatagatgaaagaaacctcgaggccccgggcgtggaaaaggacccaccgacgtcggtgatcttggtgcagatctcggtcagccggtcgccggggctcttgtcaggcgtgttgagaaagtgggggcgcagcagcgacttcagggtggagctgatggcgatgaggaagagcttggtgtggtagtcgcacacgcgggtcaccgtgcagggcgacagcttgcagagcgaggccttcatggccaggatccgggtggagaggacctgagggcaggaagccaggtcaccccaaggggccggagcagaggcgcccgccaaggctccagctgaggagaagagcagttcgactctgacaccaggcgctcggtcagctgggcaagctgcttcgcctctgcacctcagcaacctcatggcaaaacaggtgcggaagaccaggcgcacaggaccaggtgctgggttctcagctgggagcggctctgcctctggtgggggcccctggtgatgtctggagatatttttagttgtcaccactgggggtgcccctgccaagtaacgggtggaggctggggaggctgctcaacaggacacccccatcccagaggctgctccagcccccgatgtctgtggtgcctacggggagaccctggtctagagagaatgaatgaatgagctgaagcattttgggaggctgaggctggaggattcctggaggctgggagttggagagcctgtgcaacgtaggacaccccatctctacaaaaaatagaaacaactaaaaacaaaaatgaaacgcttggcacacagcgacggcccaaggagggagagggcgaggtctcgccatcactagcgctgtcactggctacggatcccagccacgctggggtttagcctcgcagcccccgcctgggtctcacgcgtttctcggcaggctgtgccgtgaatgggattttttttttcccattttatcttcgtattggtttctgatggcacagaggaaaacaagtgaagctcagagggctggtcccacgtgcagctgccggctgagctcgttagatctgaggtccttcgaggacactctgggattgcaggcacataaccacaccactgcaagggacccttctggcacgtgggcctccgtatccgctccctcctctccttccgacgggcgggtctctgtgtgttcatcttctgaccgtgtttgctgaggcctcacaccacagggccaccgggtgtgcatcctggtacccatcacattctgagaggatggcttagaaagatacctccagactgggaacactggagaggggagccgtccaggggggatcaggccttacctgtggggcttaacgtgttacagaagaaacttcccaggtaaggaaggaaactgcttctctgaggtgcagctttcctggacgggcctctgggagcacaccccacacgcagcctcacctgccacaggctacctgcccctcttgccctccgcctgccatagagcccccaacctgccgcagggaaacccctccagctgccacaacccccacatctgccgtggggacctctacaactgctgcagagacctcctccaccctccaagggaactccctccctgctgctggcactttactgaccacggggcccctgcctgccacagggacagccccacctggcacgggaccacctgccacggggcccccacctgccacggggccccacctgccacggggcccccacctgccacagggcccccacctgccacggggccccacctgccacgggcccccacctgctgcagggcagcggtctggcgcgtgtactcctcgtgcagcttctccaccaggctctgtaccatactgggctgcacgtgcagcaggatgtcccaccagtcgtagccggtcaccatgcagtactccagcaggaagagcaggtgccgcagcgccagccccacctccagcgggtggcccatggaaggtgagaggcggagcacgctcagctgccagagacagagcccaaggagagcccggtgagatggggctgcgccctcagccgggagaggaatggggccctggggctgcggcacgtgtgtggatctgtgtgcgcgcacgcccgtgtgtgggcctgtgtgcgcgcatgtgtctgtagcgtctgtacctttctgtcagggtcatgcacaatgcctctgggaacagggaaggaaacctccctgagccccgactgcactggatgccgagccaggcttacactcgtctgctttacctgaggagtctaccccgtgaaaggcggtcctctcaacagctcctagttacgaagctcctaatacgtgctgtgagccaccccactgacctcgctcaacaagacgaacccatcacacagacaaggcagcgcaggcaggggctggcgaggggcttgcacctgtggtcccttcccccgggggcgcctccctctggcaccctcccagccccagccccagccccagacccacgtgccccagcagctcgccttcccctggttgtcaatgcccaccagcccctgccccacgtgccccagcagctcaccttcccctggttgtcaatgcccaccagccccagccccagccccagccccagccccacgtgccccagcagctcgccttcccgtggttgtcaatgcccaccaagcccagccccacatgccccagcagctcgccttcccctggttgtcaatgcccaccagccccagccccacgtgccccagcagctcaccttcccgtggttgtcaatgcccaccagccccagccccagccccagccccacgtgccccagcagctcacctttccgtggttgtcaacgcccaccagccccagccccagccccacgtgccccagcagctcgccttcccctggctgtcaatgccccccagccccagccccagcgccacgtgccccagcaactcaccttcccctggttgtcaatgctcagcagctcaccttcccgtggttgtcaatgcccaccgagcccagccccacgtgccccagcagctcaccttcccctggttgtcaatgcccaccagccccagccccagccccagccccacgggccccagcagctcgccttcccctggttgtcaatgcccaccagccccagccccacgtgccccagcagctcaccttcccgtggttgtcaatgcccaccagccccagccccagccccagccccacgtgccccagcagctcacctttccctggttgtcaatgtccaccagccccagccccggccccggccccggccccacgtgccccagcagctcaccttcccctggctgtcaatgcccaccagccccagccccacgtgccccagcagctcaccttcccgtggttgtcaatgcccaccagccccagccccagccccacatgccccagcagctcaccttcccgtggttgtcaacgcccaccagccacaaccccagccccacgtgccccagcagctcaccttcccctggttgtcaatgcccaacagccccaaccccacgtgccccagcagctcgccttcccctggttgtcaatccccaccagggccagccccacgtgccccagcagctccccttcccctggttgtcaatgcccaccagccccagccccacgtgccccagcagctccccttcccctggttgtcaatgcccaccagccccagccccagccccagccccacgtgccccagcagctcacctttccctggttgtcaatgtccaccagccccggccccggccccggccccggccccggccgcagctccacgtgccccagcagctcaccttcccctggctatcaatgcccaccagccccagccccagccccacatgtcccagcagctcaccttcccccggttgtcaatgcccaccagccccagccccagccccacgtgccccagcagctcgccttcccctggttgtcaataccccccagccccagccccagccccagccccacgtgccccagcagctcgccttcccctggttgtcaatgcccagcagctcaccttcccatggttgtcaatgcccaccaagccgagccccacatgccccagcagctcgccttcctctggttgtcaatgcccagcagctcaccttcccatggttgtcaatgcccaccaagcccagccccacgtgccccagcagctcaccttcccctggttgtcaatgcccaccagccccagccgcacatgccccagcagctcacctttccctggttgtcaatgcccaccaaccccagccccacgtgccccagcagctcgccttcccctggttgtcaatgcccaccagccccagccccacgtgccccagcagctcgcctttccctggttgtcaatgcctaccagggccacgccccagcagctcgccttcccctggttgtcaatgcccagcagctcaccttcccgtggttgtcaatgccccccaagcccagccccacgtgccccagcagctcacgttcccctggttgtcaatgcccaccagccccagccccacgtgccccagcagctcgccttcccctggttgtcaatgcccagcagctcgccttcccctggttgtcaatgcccaccagccccagccccacgtgccccagcagctcgccttcccctggctgtcaatccccaccagggccagccccacgtgccccagcagctcaccttcccctggttgtcaatgcccagcagctcgccttcccctggttgtcaatgcccaccagccccggccccacgtgccccagcagctcaccttcccgtggctgtcaatccccaccagggccagtgacgtccacgatagctgcatagcctttaagtggacggcggggcccgcggtgcgggggcgcttcatggccggctcatccacaggcctcggggccgcggagctgtagaagacggccatggtctgcagtgagagccggtgcacgatgtggacgctgccgtcgtggaaggccagggccagccctgtggggcacaggcactgcttagacatgggcagggcccaggacacgcccgccgggggaggggcctcctgctctgcagggtgtggagagccggggctgcccatccagggggtcagcccccgccaatcggcatccagcgcccgtgcccccagccactctttctttagttacacagtccctgagcaccaggggagcaggagccagcagccttggccacactgctcccagcccctccccgcccctcccagctgggcccatgtcctggctgacacgcccctcaaggagcgcaggggaggggggcactacaggtgggggaccaagggttggggctcctggcgtcccaaagagaggcatcttagggtggtgggctggggctgtcactcacactggggtctgccattgtacgagggccggggggaggtggggtccagagcccaaagctcatggaaaagagaatatgaaaggagtccctgcagtagagaggctgcaaagccgggcgcggtggctcacgcctgtaatcctagcactttgggaggctgaggcgggcagattgcctgagctcaggggttcgagaccagcctgggcaacaccggtgaaaccccgtctctactaaaatacaaaaaattagccgggcgtggcagcacgcgcctgtagtcccagctactcgggaggctgaggcaggaaggagaatcgcttgaacccaggaggcggaggttgcagtgagccgagatcacaccactgcactccagcctgggcaacagaatgagactccaactcaaaaaaaaaaagaaaaaaaaaaatagagcctggaaaatggagcataaaccaagggttttggagcagggaactgcatcccctcaacctctctgcaggctctgaggaacagccctgagccccgagcgggttttgataaatgctctttccagggaaccagggaagaacgggagctgggggaagaaagggcctgagctagggccgacttgtccacattttacagctgagcaaatagggtaggcactgaagagtgtgcagactcactcatgggcacggatgccacggtttgagctcaggaccacattatggctgctgcagcacagagaggacacatgccgcctacccaggaaggagttccaccaagttccccaggctcccttgttgatttgcaatgactctttacatattaaagaacactggatctgtctgccagcctcacagatcccgaaagatgagatctgcctcctaattgggaacccatcagaacccagaaggctgagctcctacagccccatggcctgtgctcagagcccacgtcctctggtgtgagctcccacgaccccgtggcctgtgctcagggcccaactcccctggtgtgaactgaggccccgcgtggctgccgctggctccaccgtaccgaggccagggtagaactgtgtgtcgctggccaccttgaggtcggtgttggtgagcgagatgggcagcttgggcagcgccacggccgacacacggtccagatcgttggtggccgataggatccgccatttgagaattgtgggctgtttgtcgccaactgaaaaatcaggggcaggaaaacaggaaggcaatggagtaaagacaggctgagacagccgcaggagtccagcatggcctggtgtgcaacctgcccagggcccttcccaggtctcatgccgccctgctcccatgcccagaagaccaggcccggccaatccgagcgcttcgtgcctcggccactcattggttccaggatgggcacgtgacccaaggtgggccctgggatttcatggaaacctgtgggccggcaccatctcacccccgatggggcagacagtggggagacggcgccacctcagacctgcagccatgcaaaccctaacactcgctcggccttagccagctcagccgggattcccatccctcctcatctacaattccaataaagccatgcgggatggtcgcacccacagatccgctgcctgacagcccctgcgtgaagacgcagctcctcccaacagggcagagacttctgggaatctcaggccaagccttagcaaatgtgacatggccgggcacagcagctcacatctgccaccccaagactttgggaagccaacgccagaggatggcttgagtccaggagttcaagaccagcctggacaacacagcaagaccccattctctacaaaaaaaacacagtaaacattagctgtgtgtggtggtgatgcacgcctgcacacgcctgtagtcccagctactcaggaggctgaggtaggattgctcgagcccaggaagatgaggctgcagtgagccaagatcacgccactgcactccagcctgggcaacacagcaagagcctagctcaaaaacaaaaaacaaaaacagtggcccagagagcacgtgtggggggtcctgctgtggctgcatgtgggacacggagggcagctggagccggcctgctggagcatgtgcggccagtggacaggccacgccacctcggctgctaaccgcagacacgtgggaaccaggagagcgcagctgaggcagccacagaaacagaaacagtgcagggctgctggcctgagctgctcagtttggggctggcttgttactcggctgaagctgactaccacgcagctgctctgtgccacccgcatcatgaggtctctgccccggacgggccatcacggtcacagagccttgacctcctgcaaacccgtataggggtcctgtgagcagcattccctggggggaaacaggcccagagagtggctgagacgcccagagggcacacagtggtcaggggtggctggccctcatggaattgagcctctcataggaaagacaggaaactcaacgccccagcgccgggggaggcagctgccatgacgaccacacccccagctagtggccagggtaccctcacagcacgatttacatcccctcctccatccaactgacggctgcggtcagcattcctaaatgaggggggacttgaggcagggagaagctaagctgctaagtggggatgtggggcagtgggtgaagagctgggcatggtaggaaccgaagcctggcatggtgggcacgtggggcggtgcgtgaagagctgggcatggcggggaccgaagcctggcatggtgggcacgtggggcggtgggtgaagagctgggcatggcggggaccgaagcctggcacggtgggcacgtggggtggtgggtgaagagctgggcatggcggggaccgaagcctggcacggtgggcacgtggggcggtgcgtgaagagctgggcatggcggggaccaaagcctggcatggtgggcacgtggggcggtagggggagagatgggggagagatgggtgcggtggggactgtcccagtgacccccagctgccagggatgtgagacctgagaaaggctgtggcatgtgtgtgagacgtggctctcgggcgggtaacagctgggccagcaggtgaggacggctgcaggagacgaggaggagtgtcggagcccaggactgcccagtggcttggctgtgggcagatggtagacacagacgtgcccagcgggggcaccgggcagtgaaggtgcaggtctgtgcagccacacggggtggcgccaggtgctgctgcaggagccagcgcagcccaaactgcctggtgactcaccacgaggcccaggggaaggaatgaggcccaacaaggccctggggaccgggcgaaggaacgagccctgggagaaggaatggcagcagccctcttcacctgcctggtgactcactacaagccctgggggaaggaatggcagtggccctcttcacctttactgcctctgcggccacaatgggcagttgacataaccacctgcaggccccgggagccatcggggcctcttgacacgtgctcattagtggcttctgaggagcgcctgccccacctgccccacgtgcccccacgtctggccactccagggtccattagcgctaatcggcaaatgcctgtgctctcatctaccgggaaaacatctcccttctccagagcggaggccagcctaaaaaccaggcccgcagcctccgaggctctgaaaaccaagcggctgttctggtccccggtcatagcaggcgggcgtccctgcttcgctccagccccaggattttgtgccggaggtggggatgacgggcttggctccgtgggtgcggggggcccatcgggcggatagagatgggaatgggggccccagaagaggctgctggagaggtggggtggggtggggggcgtgttctcagcagcctcagctgacccgctgagccttggcttcctctccctgaaccaggttccggaggattccgtgcaccgcccctgcccggtctggcctgtcccctgctgcccgacggccccacccacagacccacgctccacagccgcccacacgcctgcagcccctcacggtgtccccgctggctgagcaacgacacctctcagcctcggcctcgcacagaatggtggcagccgccgcagcgggcgtggaaggatggaggagtctatacgcctaacacactcagaatgctggcaggcgcgcggtcacacccgagatcctagcactactggagatcgaggcgagacgatcgcttagggccggggttcaggaccaccctgggtgacacagcaagacctgcctccaaaataaaaaccaaccgcccccgagggcaggcccagggcctccgcagccggcgggagactcacccacgggggagatctgctggaagatgttgttcacggggagtccctccttgcgcagggaccagcactccacgatgctgctggtctggctggacgcgcacaaaagcacctgcgggggaggtgggggtgagggctgacccggcactgctgtggtggccacgccaccaccggagcctgagctgcgggaccctggggccacgcactgctgggcctgtctcttcagccacgcctgcccctcgggccctcctggattccagcccaggcctgtccccagagcccaacatccactcacaggaacgcaaatgtccccggatggtgccctcccacagggacagcaaagggacacagggaaccaagtcaggggcttcaaggagtttggggcgttactgattcctaattacaacaggaatccaggcgacctggtgtggtcggctcaacagtggcccccagaacatcccatcctcagccctaggaccggtggctgggccgcctctcacagagaagggacctgcgggtgggattcggttcgggacactgagacgggagagcacgttggggggggtccgggggccccagtgtcctcacagggtcctcaggagagaatgtgggaggttgagattcagagacaggaagaggctgcgctgtggccacgaagcgggaggaaggcgccccgaaccgagggattgggcgcctccagatgctgggaaaggcagaaaatgggttctcccctggagcccccgggagggaccggccctgcccacaccacggtttagcccgtggaggcccgcgcgggtctccacccccaggaccctgagaagcagtgcttcattccaagcctgccagcccacgtgatggcctgcgcccgttcacctgctccgacatgtcccgggccaggaacttgaggtgggtgatggcgggaaacttgtccttgcggttgaggtcggtggtgcagcgcatgaacagggagggcaggatctccgtgtcgatacggcacttctcgctcaccacgctcacgcacaccttgtagaactgcacgggcgacgcgctgctgccgtccgccgtggccaccacgatgttgccgccgccggtgaaggcgatgtcggccagggccacgcggccgcgcagccggcacaggctctcggtggacgtcagcacctgcccgctgggcttcagcagggacacggtgaccaggccgctgaccgtcaccgcgatccagccctccatgggcttgccgccgaacagcgtgagcgacggtgagaacttgactcgggagaacttctccccgaagctggaggcgcccgactgtggagaagggagggagggaggaggggccgctcaggctcatgggggctgccccatgacccccagaaacacgcgcacagaagaaccacgcagaagccaggagtgtgtgcacctgggttcagatcctgactcggccacctgagccgtgtgggatgtgatcccctctgaccctccgtctcctcatctgtaaggtggaaggaacggcacctttgctttagaggacagtggggaggattaaacgggtgaacgtgtgcgcaacgggagtcacctcccctttctgtaaagggacagacagcagcatgctcggttctgggagccaggtggtccctgttgcaacgacttggctctggctctgccgtggcggcacacaggcagctggtgccaatgagccacactcacaaacccaggcgggggccgtcaggccctgggccgcactgtgcagacctgagctatagcactcaggaagtgctgtgtaagcaccagcggctgctgcgggcactatttgatttcaaatcaaatttgtcaagtcattattgacatacggaaacatccacccttctttcaacgtgagtcttttaaaagatggggtcttggctgcgcacggtggctctcgcctataatcccagcactttggggggctgaggcaggtggatcccctgaggtcagcagttcaagaccagcctggccaacacagtaaaagcctgttgctaataaaaaatacaaaaaaattagccgggcatggtagcgggtgcctataatcccagctactcaggaggctgaggcaggagaattgctggaatccaggaggtggtgattgcagtgagccgagatcacaccattacactctggcctgggcaacgagagcaaaactttgtctcaaaaacaaaaaaaaaaagaacaagaaaaatgtctctacgttgtgaaaaaatgcgaggaagagaagtgtatcatacgtatcgtacggctccattctaagttacaagttaaaaaaaaacacttcttatagcaagaagcaggtccagaagtccaggaagcaagccaggcctggtggtgaggggttgccatggcgacgactcatctggtgtccacaccacacgtctgtgtgggtcgcaggctggcatgtctgagactatgttaaaggagcacatgtgccttttattaatgtaattaaaaaacaaaaatttggccggacgcggtggctcacgcctgtaatctcagcactttgggaggccg[132 bp omitted]gaggcaggagaatcacttgaacctgggaggtggaagtttcagtgagccgagatcgcaccactgcactccagcccggttgacagaacaagactctgtctcaaaaaaaatgtatttggttattttaaaaagcgaggctctgactcaggccacagcggggatgcaccttgaggacatcacgctcagtaagagatgccagacacagaaggctacgcagtgtgtgatcctgtttctatgaatgtccaggacaggcagatccagagagacaactgggtctcgggggctggggtgggggatggatcagggtgatgcaggatggggactgggtttccttttcgggtgatgagaagggactgaagctgggcacagtgactcacgcctgtcatcccagcactttgggaggccaagacaggcagatcacctgaggttaggagttcgagaccaccctgaccaacatggagaaacccggtccctactaaaaatacaaaaaagcagccgggcgtggtggcgggcgcctgtaatcccagctattcaggaggctgaggcagtagaatcgcttgagcccgggagggagaggctgcagtgagccgagatcgcgccactacactccagcctgggcaacagagcaagaccctgtctcaaaaaacaaacaaacaaacaaaaaagataaaggtctggccgggctcgttggctcacacctctaatcccagcactttgggaggctgaggcagacggatcacctgaggtgagaagttcgagaccagcctggccaacatggtgaaaccccgtctctactaaaaaattacaaaaattagccaggtgtggtggtgggtgcctgtaatcccagctactcaggaagctgaggcaggagaatcgcttgaacccaggaggcagaggttgctgtgagccaagatcgcatcactgcactccagcctgggggatagagcgagactctgtctccaaaaaaaaaaaaaaaaaaagataaaggtctgaggttagctatggtggtggccgcacaacatggcgagtgtatacgaaacctctggaccgtgtgggctgcacactctcaatgggtgagttctaaggtctgtgaactccatcccgacaaaactgttaccaaaaacaggaaatacagacaaacggggaccgcagggtggggagtgcaccccggagggcccccgtggcacgaagccggtgctgcgtgtactgcggcaatgcgccgacaatggcagtccctggggagggactcacgaagggacgagagaaaagatcttgtccactgcatccctccaggaaggcctcctagttcctgcgagagccccagcacaagcagacgcacagaggcacgaagctggggtggctgtgaggcctttgccacgaacatccccgagaccctgccgtcagtgaggaaactgacacacagaggtgaggagtcagagcctgaacccaggtgcccccccaaccctggccacgcctactcttaactgtcccccccaaccctggccacgcctactcttaactgtccccaaccctggccacgcctacttcttaactgtccccaaccctggccacgcctactcttaactgtcccccccaaccctggccacgcctatcttaactgtcccccccaaccctggccacgcctactcttacctgtggggccgaatcacagggagcatagagaggggctctgggatgttactaaatcagagggtgggctgcattcagaagacagcagccaccagttatacatgcagctacctaaggacagtagcctccagtgaaagagataactcactaagaacggccaccctcagttaaatgaggggccactgaacacgcaggtgccaatgacagccagactgcaggtgggggccaagtgaacagccaccctcagttaaatgagaggccactgaacacacaggtgctaatgacagccggactgcaggtgggagccaagtgcaaggtccaaaaaaccaggggatgctggtgatggagaggagaggggctggcgggtggctgggtagggtgacatctcatctgcctcatccgctcactcgggcaggacactcaccttctccacgtgcagggccagtttcacaccattgtgcagccaggacagggccacaatggggtccccctccactaggctgcccactgagctctcccagctattagccaggtggtccgccatgctccagcacttgatctgcccgtcggcatctgctgacaggagccgggagcctgagggcaagaagccatcattgcgaaccttccagggatgggcagagcactgcgttgcaggacggcacagcgcctgggggaagccagcccagtggagaggtctcggcccaggtagggcacagcaggtggcacaaggcgcactccagagatgccctgagacaccctgaacaagaatgattcgggccactatggaaagagcagcaggtgcaaagctgcagaccaggggctctagacccagcgccggactccagactgaccggagaaacacagggcccccctgctccgggatccgggtcgccacccctggccacgtgggaccagcgcctcacctgactggtcccactccaggcaggtgatggcctcgtggtgctctgaggggatcgagtgcaggtcccaggggtgctccgtgtccaggatgtggatcatgcgggtcaggtctgtggggacggggcatggtcagcacggcctggcaccacagcctgcagacgatgacgatgactccaggcaggctccaggtaagccggtgtgtgtcccaccccaggaaggtcacagaactgctgtcagccgagtcgacagctcagggaacaggctgtccccccgcaggaacagagcaggcctgtgaggcgccacaactgtgtctttaaaaccagattagaagaaaatgactccgaaatgtgaacagtgggagcctctccacagcagataataggtggcttttttgcaccccgatttgattccaattttctgtggttttctagttttctctaatgaccacgtattatgagtgcctattactcaaacaatggagagaagacgggcacagccaccacgcacctttcaaaaaccagtgacacacaccgtctagaaaactggggcacgtgtctccaacaagcctccgtcaaccaacgctccagcccgattcgatcccgcacacggggcgatctcatgtctcctggcaccaggtttggggggcactgaatccaccctctgtacccccaggaggctgaggctctcacacaagttacagaggagggccagggtgagtgagaggtggcctgagagaccgagtcccttcaaggcagtgggccgggcacctggggaacagggcgggacaccatgcggccgggaggggaagcaggtgggagggggacgcaccctggtcatcgctgcgcaggtccatggtgaaggcgatgagatttcggcaggaccaggcgcaggccaggggcaccgatgggcagtgggtgctcttggaccatttctcccactcacagacgtaggccaagtccatcatcccacctgccgctggccgccgcaaatcacacatgagggcagtcaccagctcctgcgggagggaggtgtggtgggacgtctatgttggctgagcacccagggcatgtggagtgccaggccagaagtgggaaaacaatggaggcccgtggtagagggaacagccgatgcaaaggcccggaggccagacagagcctggggctggggccgagggggaacatggagaggtcagggccagtcctgggcctgtgggcttctactctcagtaaggtgggagcccgggagggctgggacctatttgggtttcaccaggacccctctggctgtctagggaacagaccatgggggccaagggcacagccgggagacgcagcggagggtctgcgctggcccaggtgagtgatgatgggggcagcaagtggacactagctctctcccgaaggaagagcccgcagacaggcaagcggtggggcggctccctgtagccgaggcggggctgagtgacagggaacacctgtggccgaggcggggctgagtgacagggaacacctgtggccgaggcgggggctgagtgtgacggggaacacctgtggccgaggcggggctgagtgtgacggggaacacctgtggccgaggcggggctgactgacagggaacacctgtggccgaggcgggggctgagtgtgacggggaacacctgtggccgaggcggggctgagtgtgacggggaacacctgtggccgaggcggggctgagtgtgacggggaacacctgtggccgaggcgggggctgagtgtgacggggaacacctgtggccgaggcggggctgagtgtgatggggaacacctgtggccgagccgggggctgagtgtgacggggaacacctgtggccgaggcggggctgagtgtgacggggaacacctgtggccgaggcggggctgagtgtgttggggaacacctgtggccgaggcgggggctgagtgtcacagggaacagagggggcacctcctcgaggctttctaagcgcctggcatccagacgggctgtttcgcttcgcaaaggcaaaagcccagggagcctggaatcacccgcaaccaggttctcctcaaaccctaaccccggctccctacttcttcagggcctgccccagacccccaaggctccgccacaagcctctaaaagtctttcagccccacccctgaccccctttgcttcccacacttcatttcaccccttgagcccacggcctcaccctaaattctcaggcttcaccgtaggggtcccatgtactctccaggtccagcctccaacgcccttagctctccaggcccaacccctaaaactccccagtccccagactccaccccggggaccccacgtactctccaggcccttcccctattgcccccaaatacgaggcttcatcccagggaccccatagcctcttcaggccccgcccctataacccccaatctccagggtccatcccagggaccccctaccctctccagacccctataactccgcagtccccagtctccaccctagggaccctattccctctccaggccccgcaccgataaccccgcagtctccaggccctgcctctacagccccccagtccccaggctccaccccggcgaccccaaacccactccaggccccgcccccgaagtcccaccaagcgccttcagcctcgccccaaactctccttaggccccgccccgaacccagccccgcgggcctcaggcctcccccaggtttccgccgcaaaccctgagccccgagccccgcgccccgcgccccgcgccccgcgccccgcgccccgcgccccgcgccccgcgccccaggccgcctacccagcagcctttgctcccggccacgcccccgaccccgcaggccccgccacggctgcgccgcgttccctcgggtccgtggacacggtcaggggtccgtccgccctcgccgggcccccgcagccccgcactcacctggtcggcccgtgcgccaagctcagcgggcgtccgcggtgcgatcttccctagcgcctcgggtctggcgccgccatcttcctcggtaacaaccagtcgcctgaggcgtggggccgcctcccaaagacttctgggagggcggtgcggctcaggctctgccccgcctccggggctatttgcatacgaccatttccagtaattcccagcagccaccgtagctatatttggtagaacaacgagcactttctcaactccagtcaataactacgttagttgcattacacattgggctaatataaatagaggttaaatctctaggtcatttaagagaagtcggcctatgtgtacagacatttgttccaggggctttaaatagctggtggtggaactcaatattcgtgctcgcttcggcagcacatatactaaaattggaacgatacagagaagattagcatggcccctgcgcaaggatgacacgcaaattcgtgaagcgttccatatttttttttttttttccattttccctcccagaaacggaatcttgctctgttgcccaggctggaatgcaatggcgcgatcttagcttgttgcaacctccgcctcccgggttgaagcgattctcctgcctcagcctcccgagtagctgggattataaacatgcgccaccacgcccggctaatttttgtattttggtagagacggggtttcgccatgttggccagggtggtctctatctactgacctcctgatccgcccgcctcggcctcccagagtactgggattacaggtgtgagccaccgcgcccggcctttcttccattttctaatgtccaagagtggggaaactgtaagcgaagtcaccgaccccgttgagtattcctacttccaaccctattcccacctcctcctccaaaagccagtttaatgcaatggatgtggtgctcttctatttttatttttattttttttgagacagggtctcgctctgtggcccaggctggagtgcagtagcgcgatctcagctcactgcaacctccgccttccaggctcaagcgattctcctgcctcagcctcccgagtagctgggactacaggcgcgcaccaccatgcccaacaaattcttgtatttttagtagagacggagtttcacca[139 bp omitted]gcccaggctgatttcaaactccaggcctcaagccctccttccaccccggcctcccaaagtgctgggattataggcgtgagccaccgcggcctcactgcatgatttttgcaagaattctgcaaatataaaactgttctaaaattacaggttaacaatggcccaaatatcagagtgttttttctggatcagggttcagttctccaagagggccacgcagtgaccttacagaaaatccccattcccaggcagcaggtagggatttaacgttcttagcggcccgggtgtggtggcacacacctgtaatcccagtactttgggaggccaaggtctgaggacagcttgagtttgagaccagcctgggaaacatagccagaccccgtctctacaaaaaaaaattaaaaattagcagggttggggagggaggggcgctgggcaaggtggttcaggcctgtaatccctgaactttgggaggctgaggcacgcagatcacctgagaacaggagttcgagactagcctggccaacatgttgaaaccacatctctactaaaaatacaaaaatattagctgggcatggtgacacatgcctgtagtcctagctactctagaggttgaggcaggagaatcacttgaacccaagaggtggaggttgcagtgagctgagatcgcgccactgcactccagcctgggggacagagcaagactctgtctcaaaataaataaataaataaataaaatagctgggtggggtgatgcacacctgtaggcccagttactcaggaggcaaaagtgggaggatcacttcagtctgggaggtcaaggctgcagtgagctgggattgtacctctgcactccagccagggcaacagagccagaccctgtctaaaaaaaaaaaaaaaaaaaaaagagaggttgaattcctaactcccactacctcagaatgtgaccttatttagaaacagggtctttgcagaggtaatcaggttaaaaggaggtgattagcatgggcctaacctaatgacgggcatcatagagatggatatttgggcacagacacgtgaggagaggacgatgtcaagacaagacataacacacagggaaaacggccacttggagatgagaccacagcaatgtggccacaagccatggacacacgaagtccccagaaaccgggaaaggcaggaaggctcctcccctagagacgctggagggagcactgccctgcagacaccatgacctcattcttctacctccagcattgtgagaggatagatttcccttttgcttctctttgacctagggtcttcctccatacccaggctgaagtgcagtggcacggtctcagctcactgcaggctcaagtgatcctcccacctcagcctcccaagtagctgggactacaggcgcacaccacaccctgctaatttttgtgtgtgtgacagagttttgctcttgttgcccaggctggagtgcaaaggtgcgatctcagctcactgcagcctctaccacctgggttcaagcaattctcctgcctcagcctcctgagtagctggcattacaggcatgcaccaccacactcggttaattttgtatttttagtagagatggggtttctccatgttggtcaggctggtcttgaactcctgaccttgtgatccacccgctttggcatccccaaagtgctgggattacaggtgtgagcagccaccatgcccagccaaccctgctaatttctctcatgttttgtagagacaaggtcttgctatgttgccctggttggtttcaaactcctgggctcaagcgatcctcctgccttggcctcccaaggtgctgggatcacaggcatgagctactgcactggccttctgtcgtttcaagccccctgtgtgagaccctccattacaggggccccaaggcactcgtacaagccactcactcaaggtctacaggggccccaaggcactcctacaagctcctcacccaaggtcacacggcaggcatgtggcagagccagggtttgaatccaggcaaccaagggcagaggagccaggggggcacctgcagcccttggtggccaggacctactaagcccccggccctgccccgaagaaaaacacacatagcccgaggccagagcaccagaaatttattaaattccccactttcccccaaaacacaattacccacacgcagcaagggggtgcggaggccccccagcctggctcctgcagcctgggccaggaggaccagcatggggacacaggagctatcaggcaggagtcaggctgggggacgaggggacacgggatggggtgacagacaaggtagtgcaagggcagaggcttctggctggaagtcctggacccccagcataaaggaggggaggaaaggaagggggctcatataaagcaggagaccctgagccccgacacaggtggcgtgggggaggacacgcagaatgacgaggataaaaccggctcttaggaccgtggcttctgtcctgggtctcagggcacacgcgcgcacacatatacaacacaagatgcttctggcatgaggggcagggtcccagagaccccaccctcattcaagctaaaaactgggaggggctgagcaggggctgggaccaagacccatgttttaccagtggggcgagtttttttggtttttctctccaaaagggaaatttaaaaatctacaacaaatcacaccaaattcattaaaagtgataaaaacccagcctccccctcctcacttgagcttcagaccgggccagaaaagctcaacgatgaagaaacaggaacatgcccaggtcaggtctccccacccaaacacaagtcccggagtgggaagcttggagctgggatggcatgggcagccccagccgccagcgtctgttgactgccaagagctgcgtgaggagggggcagagtgagagagaccaccccaagcgaaaaaggtttccgaggacaaattctaaaaatatgaaagatattttagccgaaggtatcggagggcttgatggctgggcgaggtggcagcggggtctccgcggggccgccatcagctgtgctgctccaggtaggcggacaggagcagccccggcggcaggaaatccaggtgccgattactgaccttcatctgccgcttcccctccaggtcagcacctgcagacgggaccagcggggcaagaacgggaggaatttgggagccgcggcaggtagaggtgcctcggacctgcaccaccctcgcttcttcccagggaggtcaccgccagctggtgtgtgctggtcactgcggcctggctggccctaagcccgcaggtccgggagcctggctcacaagaatacctaaggctccctacaggagcactctcctcgggcccatctcactccccgctggcactcattccactgtgcggatggggaccctgaaacgcactgggcctgaggccgcatggccactcacacgcctgcctggcggagtgtccggcctcccctcaggctccctgccctgcagaggtggctctgaggcacccaggtcctgagtggtccagctcccaccggcctccccttccccatctccccctcactgcagaaaaatgaatgacctggccaggcgcagtggctcatgcctgtaatcccagcactctgggaggccaaggcaggaggatcatctgaggtcaggaggtcgagaccagcctgaccaacatggtgaaaccctgtctctagggctgggcgcggtggcttaagcctgtaatgccagcactttgggaggctgaggcaagcggatcacgaggtcaggttgagaccatcctggctaacacagtgaaaccctgtctctactaaaaaaaaaaatatatatatatatatatacaaaaaattagcagggcgtggtggcgggcacctgtagtcccagctactcgggaggctgaggcaggagaatggcgtgaacccgggaggtggagcttgcagtgagctgagatcgcgccactgcactccagcatgggtgacagagcgagacttggtctcaaaaaaaaaaaaaaaaaagaaacccgtctctactaaaaatacaaaattagccgggcgtgctggccggcacctgggatcccagctactcgggaggctgaggcaggagaatcgcttgaacccggaggtggaggttgcagtgagtaaagattacgccactgcactccagcctgggtggcagaatgagactgtctcaaaaaaaccaaacctaaccaaccaaaacaaaaaaaaagagccacgtcccatgtgagctccgcgcctcagcagtcccctctgcctgggacccccccgtcctctactccccatcttgctgggacccctcctcttccgtgtcaggaccacagctccacacccaccaagctccaagccccgcacccccagccaaggccggatgttctgagcagaggcaggcatgggggctgcgtctcccacagagggaacagagggaggcatcgtccggttgccatggaaactgtcacctcggcaactccaggcggggcggcagagacaggtgtgagaggctcaggaccagatggggtgcctggggccggcggcgcctgcacagacgttcactacgggggtgagttctgagactgcgccccgttggaaaagtggagcgcaggggccagtagggggtctcgcctgaggtcccacgtgtggtatgtgggaggccttagagttaaatgcaaaccttccagacactgcgtccccccatcttatctctggctctgggaggtccctcaaatccaggcttcatcacccccaccccgggccccgaagatgcagatggaggagtgtctgtgtccagcagcctggttgtgtctgcggtcaccctgcgtggggccgcatatgcagggagcttctggtgaattcaaggcagggtcccactgccacccctgagttcgtagcgtccccactccagcccccttccccacctccccaccaagccccactctgaggaaccaggcccctgggaccctggccactttcccaggttgagctggccaacttggggtcttgggggccaccggcacttactggccgagatgaggtccatgtactggcagacagcgtgcagcagaagcctctcgaagctgtggggaacgggcagtgagcgccgtgcaggggctgcagcgtggggtgtccgcccacctggccgcagcctcggagggtccgctcgcctggccgcccccccttacctgttgtctagcattgctgtgtacacggcctggggggacacggagaagaaccgaagcagccgctcctcccaggtctccagcgtttcctggggagagcggcccggtggtcagggaactgcgggacctgtgggtggggggccagggaggtccagggcccccaggagcccacagcgctgggctcaaacatgacctctgacccaccacgtgaggctgcttaagtgtctctgaggccaccatgccacctcctgcctgtgccttccgtggaggaaactcctacacaccctgcagtgcccgccttcgttgcccccgccctcctactcagggccctggtgccgctgtctgtatcctgccctgtttcccctgacacgacctgcaccgggtgagaacctgtgcctgggaaacgggccttcaaaaaagaccaggcaggtagaaaagggaggcccggcaatcccccactcaccatggggatgcggctgcgcttgaggacggctcgcagacgccggctgatgcgctggaagcactcgcggggtgtataggcggggtcctctgcaggagtgggggaacaaggggcagtcttggggtgctcgtcctggccctgcccacctgccagaccacgcccacccagggaagaccacgcccatctgtgccttggcctctcctgcccaccaaaccacaccttcaacgatactgtggccccatccagccagcagaccctacccccacgaggccctgaccccaacccatccagctgaccctaccctcacctgtatgttcaccccagctagacatgaggccccacccactccaggcccacacaagccagctagccccacccctacccactgccatccagatcctgcccccacatgctggccacatccactccatgtcccgccccatccatatcctacctaccccatcctggccccacacaccccattgccctgtccccatccataccctggcctcacccacacactaggtccaacccactccaggtcccgcccacaccccatccatatcctgccccccatcgcggccccacccaccccaggcctcgcccccatcccccatccatacctgggcccaacatactaggtccaacccactccaggtcccgcccacaccccatccatatcctgcccccccatcccggccccacccaccccaggccacgcccccatccataccctggccccacccatacccgccccagccaggcccgcacctctcctccggtcctccccacggccagggcccctcctccgcgccttgctcctgccctcatcctccaggtagcgaagaacccgctcctgctcctccccggagcggttcatgaaatcgttccagacctggaagagaggcagggaggcaggcttgccatgaaacactggggctgcgctgacatccccgggcaaatgggcacggtaaggccgccaagcacgtggacgcgctcctgcggtcacctctgtccactgaggggccgctgcttgtgtcgggccctgagctgagcgcagggaagcggggaaccggggtgggcccagctgtctcggggtgggggggattgaggtgaaacactcctgcaatcgttggagggttcccaaacgtgttgggcaggtgaatccaggagctcgaaggttccaggggtggggtggggattctggcctggtctggggaccccgaaggagactgaggggccttcattaggagatcagaagtgggcgggtgcttctggcgggggacgggcacaggcgatggcctggccgtaggagaactgccggggtccccgtgtggagggagtgagggggttgggggccacacctccacataggtggcgttgttgcaggcctcggcaaagatgcctggtgatgcagggggtgccaagtccccatcctccaggccaggcaggcccccgtctgtctccagcagggtcaggaggtactgggctaggtggaaacagatgctctctgggccggggtggcatttggggacccccaggcaccatggggacccaagaactagccttcctccttttttatcatctcaacctccgcacctccatgctccaactgtcttccccagaaggtacagagaccacctagaccccaggttctggattgtcgaactcctatatatcctttaaagccccagctccaatgcccggggcgccctcccacccagccctgatccaagagtccagggggcgcctgtgtctggctctatttatatggtcccccggcctacagctgacacctctttgggtccccagccccacccaggcacagctcatgggaggggtaacagataacaccaatatgcatgccattctacaaggcccaggagcccccaggaggcgcctcccgacccctgctcactgttctccaggcgctggaggctcttccgccccttggccttgggcacgaggtctgagttccgcactgcctggttgatgaagtgctgtttccgcctggaagccgagagtctcttcacctgggagctggctagggcaggcaggcagctgggaaggggcctgtgggccggggcaggggtggtcctcagggtcaaggccggccaggatctccgagaagggccctaccacagccatggcccgcttggtttcccccagcaatggagagctcacccctacggtgtgtgaagtcctgggcccttaaaatcctattttgtttcatcctcacatcacaggaagcagatacaattgtgaagacgggctgggtgtggtggctcatgccggtgatcccagcattgtgggaggctgaggccggtggatcacttgagctcaggggttcaagaccagcctgagcaacatagcaagactatgaaaaaaaaaaaagacttatttttttgtctctacaaaaaaaaataataattaaaaaattaaccggtgtgctggtacatgcctgtagtcccagctactcaggggcctgaggcaggaggatcacttaagtccaggaggtcgaggttggcatgatggcaccactgcactccagcctgggcaacagagcaagactgtgtccaaaaaaaataaaaaaaattaggtcaggcacattgattcatgcctgtaatcccagcacgttgggaggccaaggtgggtggatcacttgaggtcaggggttgaagaccagcctggccaacagggtgaaaccctgtctctaccaaaaaaaatacaaaaattaatcaggcgtggtggcgtgcgcctgtaatctcagcttactcaggaggctgaagtgagagaatcgcttgaacccgggaggcagatgctccagtgagctgagattgtgccaccgcactccagcctgggcgacggagtgagaccttgtctcaaaaaaaaacaaaaaactgtgatgatagattagtaaaccgaggctcagagaagtgaagacacttgcccaaagtcacacagcaggtgaatgaccaagaaaagctgccgcccacccccaaccccagtgttcaaggtgttagctgtaagccagcaaggcccacagcctttgggacgtgaacagcttccttcagaaatggagagtcaagaaacttgattttatccacatcccccactcccagcagcagaggagccagaaaacagccccagaagctcaaggtgatgcctcagccccccccgcaaaccccccccttaatgtcccctgtccccagggccaggaggagagtgcggctgcagcggcccccctccagagctaatcggcctggccggagcaaatggcattaattgtggagatggattagctgtcacagctgggcctcccaccgagaatccaagggccgagccactcagtgtggggggaataggcagccgcctgggaagcgggtggttggacagggtgggggtaagcgcgcaccgcagccaccgggcacccgggaagcgggcggcgtttggggggaggtaggcgcgcaccgcagccacccggcacctgggaagcgggccggtgagggggggcctcatggatggggacttttctggcaaggaaaaaccacacaaactgggcgtgggagctcatgtaatcccagcactttgggagcccaaggtgggtggatcccttgagcctggggagtttgaggctgcggtgagctgtgactgcaataccgcgcgctccagcctggacaacaagagcaagaccgtgtctcaaaacaaacaggacgggcgcggtggctcacgcctgtcatcccagcactttgggaggccgaggcgggcggatcatgaggtcaggagattgagaccatcccggctaacacggtgaaaccccgtctccactaaaaatacaaaaaaattagccgggcgtggtggtgggcacctgtaatcccagctactcgggaggctgaggcaggagaatggtgtgaaccggggaggcagagcttgcagtgagccgagatcgtgccactgcgctccagcctggacgacagagcgagactctgtctcaaaagccaaacaaacaaaaaaccgtaatgctagctccactgggctcacaaacccccacaccacagggctgaccatggcctccagggtctgggggtaccaggatcggctccacccttatctcctaactccaccccacctgaaacacattctgctccaaccccacagtggcacctcctggccgctgctgcttccaagacacgatttcccgtcccgcctcggaccttcgcacaggcggctcgggtttgctggctggctgtaacccccaccgccggcactcacagccaagcctcgttcacaggagacgctcagaaaaataaccaccaaatcaatcctcaataaaaattctgtgattccaagagagcccacagtcgaaaatccctaatagcatccagagttcccaacacaaaaattaaaagcaacccactccacccctgcaacccccaaaagactggaaaacgctaggaaactctaggccagttgagacaagattcactcgaggcaagctgggcgcggtggctcatgcctgtaatcccagagctttgggaaggtgaggaggaaggacagcttgaggccaggagttcaagatcagcctgggcaacatcacggtccccgctgctcaggaggctgaggagggaggatcacttgagcccagaaggtggaggctgcagtgagatgagatcgtaccactgcactccagcctgggtgacagaccaagactctgtcttaaaaaagaaaaaaaaaatgcagtcaagggggtcagaaatgagggcaatgctctccagggtccacacacatgtaaagagtcctcaagccttaagtctgtgcactttacagaccagctgttacatctcaatcaaaagtaaacaagctgattggccgggcgtggtggctcacacctgtgttcccagcactttgggaggcca[135 bp omitted]gaggcaggagaattgcttgaacctgggaagcagaggttgcagtgagccaagattgtgccactgcactccagcctggtgaacagagcgagacttggcctcaaaaaaaaaaagtacgctgggcgcagtggcttatgcctgtaatcccaacactttgggaagctgaggatctcctgaggtcgggagttcgagaccatcctgaccaacatggagacacccccatgtttagtctctactaaaaatacaaaaattagccaggcatggtgacgcatgcctgtaatcccagctatttgagaggctgaggcaggagaattgcttgaacccaggagacggaggttgcggtgagccaagatcatgccgttgcactccagcctgggcaacaagagtgaaactctgtctcaaaaaaaaaaaaaaaaacaaaacaaaacaattagccaggcatggtggcatgcacctgtaatcctagctactcgggaggc[137 bp omitted]ccagggctgcctgaagcaggaaggggacgggcagataaacagcacagtctccacagactgcggcaaaaatctatgaaaagtcatcagaacaaaaatctcacatatgcacaagcacccaccaatagggacctgcaggcagaggcacgggtcaagcttccaccctggaccaggtgctcagaactcaatggcccaggcaagcctggcaactccgaaactgcctcctcgccaggctgcggcgttagcagggcaggtcctggaatctcagcccagggtgtgaaccccagctacgaagcttcaccctgaaaccccctttttttttttgagacagagtctcactctgtcacccaggctggagcgcagtggtgcgatctccgctcactgcaacctctgcctcccaggttcaagtgattctcctgcctcagcctccggagtagctgggtatacaggcg[267 bp omitted]tggatctcctgacctcgtgatccgctcaccttggcctcccaaagtgctgggattacgggcatgagccaccgcgcccggctcaccctgcaacctttaacctcagccccctctcaaaaagtgggaacaagttggtttgggaggggtactcagagccaaaagggcctgggatgaattcccctcatctcagctgccacttgcttgttttcctcctatgatggggaactcacccctcagccatgccacactgcttttgatcgtaagtgtcgctggactgagtattttccccacattgggctcatttcctgtcacctgtgctgtccccggggaggcaagttctattactttgatgcccattatacagatttggggtttttttgttttgttttgttttgttttgagatggagtctcactctgttgcccaggctgcagtgcagttgtgccatctctgctcactgcaacctccacctccctggctcaaccgagtctcctgcctcagcctcccgagtagctgggattataggcgcccaccaccacgcctggttaatttttgtattttcagtagagacggggtttcaccatgttggcaggctggtcttgaactcctgaccttaagtgatccgcctgcctcagcctcccaaagtgctgggattacaggcatgagctaccacgcccggccctcattatacagatttgtaaaccaaggcacaaagtcaccgcccaagctcccattgctgcaaagagggcagctggagaaggaggtggtggaccatgccctcagcacagagcacagcagccgacgggtactcagtgggaatacagggtcatgttaagccagcgtctctgaagctggatcagcctgaagctgcctccctgaggccggagcactctgtcccatgccccagattcacccacagccccccctgaggccccggggcctacttctccaccccagcagctggacagggccgataacagaagtgacatccgaggggagccctcggggaagtcagagggggcggggctcggtgacacagctcaagccctcccagcaaggggcctggtatcaccccatattacagatgaaggatctgaggcttggagaggtggggctgtcccccgtcaccacccagacaatgcaaggagctggatgtgaacctgggtctgacccagaaccccagagctaccctgcttccctcaccacccctcataccaaagccccacaggcctctcctccaggcccacaaggacctgcctggtccttcccctgctccagcacagcccatggctccccagcatcccagggccaggcctggctcccccttggcctagcactgcaacacgagggctttcgcctgttttgtttggtatctgagggctcgccaccctcccctgggtctctagtgctgagctgagcactggaaatcgagtcccaccatcagatggagctggctgacttcaaccagtttccagcaggaaattaagaaacatcttcaagcttgtcatcccagcactttgggaggccgaggcgggcggatcatgaggtcaagagatggagaccatcctggccaacatggtaaaaccctgtctctacaaaaatacaaaaattagccaggagtggtggcgcacgcctgtagtcccagctacttgggaggctgaggcaggagaatcgcttggacctgggaagtggaggttgcagtgagctgagatcgcaccactgcactccagcctgagtgacacagcaagactctgtctcccaaaaaaacaaaaacaaaaacaaaaacaaaaaaacatctggcctctggggtagacaggggggcctgggagtcaccgacactcctctccagaaatggaaggaacaggaagaccacatcaaaatccccatgcctggccgggcgcagtggttcacacttctaatcccagcactttgggaggctgaggcaggtggatcacttgaggccaagagttcgagaccagcctggccaacatggtgaaactcccgtctctactaaaaatacaaaaaaattatctgggcatagtggtgggcgcctgtggtcccagctactcaggaggctgaggcaggagaatcacttgaacctgggagatgaagtctgcagtgagccgagatcacaacactgcactccaggctgggtgacagaatgagactgtctcaaaaaaaataaaaataaaataaaaaataaaaaaatcccacgtccagccacaggcccctcctcacagtgctccaaactcagggagccccggtctctgcctgatgcacctgctcattccagcctcagctctgtgttcaccacccccaggaacggccccgccccccacctagcccagtcagccttaccaggaagctctggaaaccaaccggccccagccggcccgtttacttctttgctccttaatcactagctcactaggcccacagaacaagacagggtccgccccccgcccaccgccgccccccggtcctggcctgtgaccggcccacagcggcgctcactgcctgtttgttgaatgaagaactaaacttctgttgacacacctcccaagggctggttcatctgtttcccacgccactcaacaagaccactttacagacgaggaaactgaggacccagcgggggtatctgaggcttcctggaccctgaaggctcgaggatgtgtgtccacagaagaggggggcagcccaagctggggagctgctggagtttgggggaacaggcctcccggccactcccaattctactccttgcagattttgagaggggaactgtgaaccctcagtccctcgagcaaaaacacacctttcccagcactggtccctcccccaggaacccactagagacagcaagagaggaaccgacttgtgcatcaggaagccagggctcagggcggaggtgactcagcctggggtggggcagactgcggcggcccccagcagtccccaaccccccaccaggacacagctggcaggtaaacacccagagactgacggctgagagcggaaacatgagtgtatttacatagttacataggagtcactacacctgggcttcaagaccagggtgccaggcgtggtggttcacgcctgcaatcccagcactttgggaggccgaggcaggtggatcacctgaggtcaggagtttgagaccagcctgaccaacatagtgaaaccccgtctctactaaaattacaaaaattagccaggcgtggtggcacatgcctgtaatcccagctactcaggaggctgaggcaggagaatcgcttgaacctgggaggcaaaggttaccatgagctgagatcgcgccactgcactccagcctgggtgacagagcaagaacctgtccccccaacccccaccaaaaacaaaaaaaacagaagactcaggaagaagagcccattttgagggtaaatgcccacaccaggtggttcaaggcccccttagaggagacgttacgtgggtgcagtggctcacgcctgtaatcccagcactttgtgagcccaaggcaggtggattccttgagtcgaggagttcgagaccagcctaggcaacatagtaagaccctcgtctctacaacaaattaaaaaattagccaggccgggcgcagtggctcatgcctgtaatcccagcactttgggaggccaaggccggtggatcacctgaggttgggagttcgagaccagcctgaccaatatggagaaactccgtttctactaaaaatacaaaattagctgggtgcggtggcacatgcctgtaatcccagctactcaggaggctgagggaggagaatcgcttgaacctgggaggcagaggttgcagtgagccgagatcgcactactgtactccagcctgggcaacaagagcgaaaccatctcaaaaaaaaaaaaatagccggcatggtggtgcacacctgtggtcctagctactcgggaggctggggcaggaggatcgcctgagcccgcaggtggaggatgcagtgagctgtgatcaaacctgggtgatagagtgagaccctgtattaataatactactactaggccgggcgtggtagctcacgcctgtaatcccaacactttgggaggccgaggaggcaggatggcttgagcccagaagtttgagaccagcttggacaagttagcaagaccctgtctctaatatgaaaaacaaaaacaaaaacaaaaaaaaagcatcctctgctccagcctggccaatagaccgagactctgtctccaatcaattaaccaatcaaccaatcaaagacgcatcctttctccttcagatacaaatcacctcggtagagatgggtatggcctctgagtggagataatagtgatgatataataaaca[140 bp omitted]ggcaaaacccccgtctctactaaaaatacaaaaaaattagccgggcgcggtggcgggcacctgtagtcccagctactcgggaggctgaggcaggagaatggcgtgaacccaggaggcggagcttgcagtgagccgagatcgccccactgcactccagcctggacgacagagtgagactctgtc[148 bp omitted]aaccccatctctactaaaaatacaacaattagctgaacgtggtggcgggcgcctgtaatcccaggtactggggaggctgccgcaggagaatcgcttgaacccaggaggtggaggttgcagtgaatgaagatcgtgccactgcactccagcctgggcgatagagcgagactccgtctcaaaatattaatactactaaaataaccaataaaacattaacgataattagtaatgagacaacggacactcctgtttgctgggcccgccgcagtgccagctcggtaacccccaccactcggagaagaggccacacttactatcccattttacagaaggggaaactgaggcatggaagcatgaaataacctgcccaggtggcgccgtccgcacacggaggaggcaggaacggaacacgcgccgcctcctcgccctccaccaacacggaccccaggggcgcaccctgggtccccgggtccctgtgcgggccggggtgacacacggctgacccccgcacagaccgccccgcttccgggtcccccgggaaggacgcgcgggctcctgcttgccaggttttaacccacaagggttgtagggatttacccaaaggagagcaaggagccgggtctgcccggaaaggcagggggcgcggacaagcccagagggcgagtggggccgggcgtgcggcagggaccaggctggagcgcatggccacgtgggtgaaccccgacccgcggacaggggcccaggaccctctggcgggaggctccatggctggcacctcggggcccggggagtgggggggcagacccgggagtgggggcgcggccccggggaggtgggggggggggtggaccagggagttggggggcggactggggaggtggggggacggacccgggagtgtggggggcggaccagggagttgggggactgaccggggagtggggggacagacccgggagtgggggcgcggccccggggaggtggggggggtggaccagggagttggggggcggactggggagtggggggacagacccgggagtcggggcgtgggccagggcagtgggggggtcggacagaggagttggggggcgggcccgggagtgggggcgcggacccgggagtgggggcgaagaccagagagtaggggcacggaccagggagttggggggtggaaccgaggagttggggggctgacccgaggagttgcggggcggacccaggaatgggggcaagaaccaggggagtgggggggtggagcagggagtggggggacggacccaggagtgggggcgtggatcagggcagtgggggggcgcggacccgggagtggggggagtcggacccgggaagtgggggcgcggaccggagagtgggggcacggaccgaggagttggggggcggacccggagagtgagggggtggacccgggaatggaggcgcggaccagtgcagtgggggggcggaccggggagtggggcgcggaccggggattagggggcggaccggggagtagggggcggaacaggtaaatggggacgtggatccgggtcccctcccccagcgagcccccggagcgccaggagggtgtccccgctgagtaacaatgaagaccccccacccagcctgggggtccacagcgggcgagaagggaaggcaggacaggctgaagccccggaagatgagcaacgggagcgaggggaacgaagggaacgaggggagggaagggaaaggaggggaggggaggcggggagaggatctcaggggagggagcccagcccgcccccggcgcccgccgcgccccgcccgcccgcgctcacagcagccgccgcccgcccggggtgccctccgccgcctccgggccgcactcggggttctccagcgcgaccatggctcgcacgctgtcgccgccgccgccgcccggcagggccttcaccgggccgggcaggaagtgacgggcgcccggaggcgggcaggggcggggcctggggctgcgcggcggggcgggggcgcccacctcccggctgccgggaacgaacgcggaaacccaggcgcgcggggaggggatccagcccctggggggacgaacggggaaaccgaggcgcgcggggcggggatccagccaacagggaacgaacggggaaaccgaggcaggcggggccgggatccagccatcagggaacgaacggggaaaccgaggcaggcggggccgggatccagcccctggggggacgaacggggagactgaggcgggaggcggggccggccacgatccctacacccagaaatctagctccgggaaggagggacacctaggcgaggggtcgaaaactcaaccacaaccctgcgtcccgatccgggctgcggactgagccaggaatccagcccagggaggcgaggagacacggacagggaaactaaggcctgagcatcgacgagggaggggacgttcttcttggaggcagaggatggcggaaattaaaactgcccgagccttccttccacctgcccctcccagccctggagcctcggctaggcaaccccttcccc[134 bp omitted]caacatgat[131 bp omitted]aaaccccctctctactaaaaatacaaaaaattagccgggcgtggtggcgggggcctgtagtcccagctactcgggaggctgaggcaggagaatggcgtgaacccgggaggcggagcttgcagtgagccgagatcgtgccactgcactccagtctgggcgaggagcgagactccatctcaaaaaaataaaataaaataaaataaagcaagagggaggctgggcacggtggctcgcacctgtaataccagcactttgagaggccaaggccagtggatcacttgaggtcaggagtttgagaccagcctggccaacatggcaaaaccctatctctactaaaactacaaaaattagccgggcgtggtggtatgcacccatagtcccagctacatgggaggctgaggcacaagaatcgcttgaacatgggaggcaaaa[135 bp omitted]gaggcgggtggatcatgaggtcaggagattgtgaccatcctggctaacacggtgaaaccccatctctaccaaaaatacaaaaaattagccgggcatggtggcaggcgcctgtagttcctgctactcaggaggctgaggcaggagaatggagtgaacccaggaggcagagcttgcagtgagccgagattgtgccattgcactccagcctgggcgacagagcgagatgctgtctcaaaaaaaaaaagcaagaaagaaagaaaaagaaagaaagagtaaggaggaaaaagaaaaggatgagaaactgtggatggactcaaaaaagcgtgcactgtgagattcctgtagataaatgtgcaaagaggtgaaaaaggacaatggagagatgtatcaggagtgactggcaggggagctgggcatcgggaatgagtggtttccccatccatcaggcacagggtaagggtagatgctcaaagaatggacctgaacatttattcgtgagagagggaggcaactccagagaacttcctgggccttcctcccattctgggttccagggcttcccttcaggggcctgggcctgtcctgtctgtaccttcttcttcttcttcttcttcttttttttttttgagagagtctcgctctgtcacccagcctacagtgatgcaatctcaggtcattgcaacctccacctcctgggctcaagtgattctcctgcctcagcctcccaagtagctgggattacaggcaccctccaccaagcccgggtaatttctgtatttttagtagagaccaggtttcaccacgttggccaggctggtctggaactcctgacctcaagtgatccacctgcctcggcctcccaatgtgctgggattacaggcatgagccactgtgcccggcctattcattttttttcctcccttttttgtctttttttatgcaaatggaagcacctttttcttcgctgtgtattactccatgatgaccaaatgtcttggactctgttgcaggatggactttgggggaacctcctggatgtcatcctggggtacacttccagctgtgggattatggagtcaaggttgtgctgaccaggctgggtggctcatgcttgtcatcccagcactttgggaggctgaggcaggaggactgcttgagctcaggagttcaagacaagcctgggcaacctagtgagatcttgtctctacaaaaaaatttaaggggggaggggggagggatagccttaggagatatacctaatgctaaatgacgagttaatgggtgcagcacaccagcatggcacatgtatacatatgtaactaacctgcacattgtgcacatgtaccctaaaacttaaagtataataataataaaataaaataataaataaaattaaaaaaaaaactttatttgcaaaaaaataaaaaataaaaaatttaaaaataaattagctggaccgggagcagtggctcacgcctgtaatcccagcacgttgggaggccgaggagggtggatcacctgaggtcaggagttcgagaccagcctggccaacgtggtgaaacctggtctctactaaaaatacaaaaattacccgggcatggtggcaggcacctgtaatcccagctactcgggaggctgaggcaggagaattgcttgaacccgggaggcggaggttgctttgagccgagatcatgccactgcactccagcctaggcaacagagcgacaccctgtctcaataatgataataaaaggccgggcgcggtggctgacgcctctaatccaccactttgggaggccgaggagggtggatcacgaggtcaggagatcaagaccatcctggctaacacggtgaaaccctgactctactaaaagtacaaaaaattagccgggcgaggtggcgggcgcctgtagtcccagctactagggaggctgaggcaggagaatggcgtgaaccagggaggcggagcttgcagtgagccgagatggagccactgcactccagcctgggcgacctgagcgaaactctgtctcaaaaaaataaataaatacataaatcagtaataataataataataatgaggctgtggcgtttgcaaggtgccctccacctggttcccgctgctagtgtccctgcgggtatcagacaccccttgtcagtcatgtgggacacattcagtcccaaaccaccagatcggggacgtccctcacctgccctgaactttccatggctctccagggtcctggggacaaacccaagctatcctcactcagggtctccgctgagggctggcctccccgccaggctgggcccaccccctggagccccagcccctacgagggtcaaagcccttcccatattcacaggccttagagttcgcgccttggctgggctcctagtccgggctgagcgtctactcgctggttaaggtcggtccttccaggtccacagcggcctccacgcggcccaccccctgcctgctccgccccctccagccccctcccgcgctctcactccgaccttgcaccgggaggagggaataggggggttgccgctgggtgaatagagggcgcgtgggcaggggagggagtggcgagcggctgccggagaggcgggaaggcaaggccaggggaggggggcacgggctataaacgctcggccgcagcggcgccggcagaggagccgccgagcccagcacagctgccctctggaccctgcggaccccagccgagccccttcctgagttccacaggcgcagcccccgggcggtcgggcggaggggtccccggggcggtgccagggcgcaatcctggagggcggccgggaggaggaggtgcgcgcggccatgcacaccgtggctacgtccggacccaacgcgtcctggggggcaccggccaacgcctccggctgcccgggctgtggcgccaacgcctcggacggcccagtcccttcgccgcgggccgtggacgcctggctcgtgccgctcttcttcgcggcgctgatgctgctgggcctggtggggaactcgctggtcatctacgtcatctgccgccacaagccgatgcggaccgtgaccaacttctacatcggtgagtgcgggcgctgcgccgcacctgctgccgtcccgggggctccgagggccgagcggcctggggcgccctctcgcgacgcatcggggccctctcggacccggctctgtcccctgcaggggtcccccccaacctcgaatcttttccctgtggtccctgcacctgaggctagaggtcgcaaactccagcgcgggcgggcccgggcgggccggagggtggggagtgtggcacatggaaacctcgacctggccactcgcggggctcgccccggtgcagcgcgggccaacggctcggtgtcagctgaacaaagggctgggggaggggctggcttggcccgcgggccttagtttgcgacccctgccccggtggctctctgagcctgtttatgcatttgtgtcctggggtcccctatcacacacagctgtgagcccagtcggtggctgctgggccggcaccattgtctccagtttgcagttgtggaaactgaggctcagagggtcaggggcctgcttaggctcccccagcccggacagggcccagcagaaccgatttctgccggaatggccaggaaatccgagccggaggcgtaatgtttgagatgtaagggggaattactagaaggcgccccaacttctccgcccgaggaggccaggggcgctgggggaggggggggcctccctgagccatcctgctggtcactcggaccaaggtgggggccaggggtcagggccaggagcgctgggcggttcccgcggccagtggcgcccacgcccagcgcccgcgcatccccaccgcagccaacctggcggccacggacgtgaccttcctcctgtgctgcgtccccttcacggccctgctgtacccgctgcccggctgggtgctgggcgacttcatgtgcaagttcgtcaactacatccagcaggtgcgctccggagcaggaggggagagggcgcacttggggacgggcgggggtgcgctccgcagtgggaggggaggggacgcacttggggacaggcgggagtgcgctccgcagtgggaggggaggggatcgtacgtggggacggggagggggggtgcgctgcggagcaggaggggagggagcgcacgtggggacggagggagatgcactcagaagctggaggggagggggcgcatggtggggcggggcaggggtgcactctggagcaggaggggaggaggcgcacgtggggacgaggagaggggatgagctccggagcggggggcgggcgcatgtggggagggggagcccacgtgggaagggaggacggaccttgggcggggcgcgaggcaacgcataggagaaccaggggctggggtgcccagcttgcgggaaggggctgggcggtggtgcagcctagaactggagtggggggcgggaatgggggagggatgcagacggggacccgggtcactggtgaggaagggctactgaggccctgaggcttcttgccccgcctgtccctccatcccacgcagcccccctgtctcagactcggggtatcagccgccccccaagggctccctcacttccccaatcctcctgccctcctctcccagtctccccaccttctgtcccctcaacccgcactggacactcctcccaggacacttcccgtgtatgtgcctgagtgttcgcacacgtagggggatcagcagggcgggcggacagggcaggctcccaaccgcgcaggtggccacacgcccggctggcggctcccgcaggtctcggtgcaggccacgtgtgccactctgaccgccatgagtgtggaccgctggtacgtgacggtgttcccgttgcgcgccctgcaccgccgcacgccccgcctggcgctggctgtcagcctcagcatctgggtaggtgagtacagctcaggggcctcacgggagaaggcggacacgtcctagtgccctgggcgcccggagccacctgccgcctcggtccagcatctggaaaatgggcgcaatagctctgcctgcctagggccagcgaggctgcagacggggcgcccgggcctttgcagggtggctgggtgaacgcctcccggggaggcacgtgggggaccgctggttccccgagcggggtcttcatcctggcttgtggcacaggctctgcggcggtgtctgcgccggtgctcgccctgcaccgcctgtcacccgggccgcgcgcctactgcagtgaggccttccccagccgcgccctggagcgcgccttcgcactgtacaacctgctggcgctgtacctgctgccgctgctcgccacctgcgcctgctatgcggccatgctgcgccacctgggccgggtcgccgtgcgccccgcgcccgccgatagcgccctgcaggtgcgcggcgtgggtgggaggacagcaaggctgggcgggcggggaggcaccgtggtgggaggcgccggtgggggcatctgcgcgggcagggacagcccaaggggtccaggaggggcggtgcgaggggatgagctgagccgggccccagcctttcgtctaaccaccttcacggcacccccccaggggcaggtgctggcagagcgcgcaggcgccgtgcgggccaaggtctcgcggctggtggcggccgtggtcctgctcttcgccgcctgctggggccccatccagctgttcctggtgctgcaggcgctgggccccgcgggctcctggcacccacgcagctacgccgcctacgcgcttaagacctgggctcactgcatgtcctacagcaactccgcgctgaacccgctgctctacgccttcctgggctcgcacttccgacaggccttccgccgcgtctgcccctgcgcgccgcgccgcccccgccgcccccgccggcccggaccctcggaccccgcagccccacacgcggagctgctccgcctggggtcccacccggcccccgccagggcgcagaagccagggagcagtgggctggccgcgcgcgggctgtgcgtcctgggggaggacaacgcccctctctgagcggacccggtgggaatccgagcggctccctcgggagcggggactgctggaacagcggctattcttctgttattagtatttttcttactgtccaagatcaactgtggaaatattttggtctcttgtgacgttcggtgcagtttcgttgtgaagtttgctattgatattgaaattatgacttctgtgtttcctgaaattaaacatgtgtcaacacaggactttctggatcattccagaaagtgtcagacgttttctcattgtcttgtagttgactgtcactgtgtacgattcattccacttttttttttttttttttttttgagacagtgtctcattctgtcacccagactggagtgcagtgacgcgatctccgctgactgcaacctctgcctcccgggttcaagtgattctcctgcctcagcctcccgagtagctgggattacaggcgcccgccaccacgcccggctaatttttgtattttaatagagacggggtttctccatgttggccaggctggtctcgattttcctgaccttaagtgatccccatgcctctgtctcccaaagtgctgggattacgggcgtgagccaccgcgcccggggcctcatcccacttttagagagactaaaatgtgaaaacagacagtgcaaatgcccatcaatcaacgagcagataaagaaaatgtggcgcgcgcgcacacacacacacacacacacacacacacagagaagactactactcagccataaagagtaatgaaatggcattcacacaacctggccggagttggagaccactactctaagaaactggaatgggaaaccaaacatcctatgttctcagcctcctgcctcagccttccgagtagctgggactacaggcgcccgccat[137 bp omitted]cattttcaggtgagacggcgccacctagcggccgccggcgctggccccgcccctaagagcccgccccccctcccctcccgccggccgcagtcccgcaggtgcccggcagatggcacgcgcggcccgcggaggtttcgcgccttcttttctcgcctccagaagtcccagaggtgccccgtgcccagggcgcggtgtcgctccttcggatcccaacctggacccccggttggaggtatccccgctgtgaagtggggcaatcagaggcacattgtgaattatcccggtcttaggcactttacttttgagggccccttctatgaaaacgttattcaaaatggtaatttattctacaatattcaccgtcaaagaaaaaaagaagaaaaagatactttattctgcttcatgtcctggaagaggggtaaaaatgatattttatatctgcgtcagtataaagagagatataacaggctggattcattatatatgattttttttttttttttttttgagatggagttttgttcttgttgtccaggctggagtgcagtggcgcgatcttggctcactgcaacctccgcttcccaggttcaagggattctcctgcctcagcctcccaagtagctaggactacaagcctatgccaccacaccaggctaatttttgtatttttactagagacaggatttcgccatgttggccaggctgatctcaaactcccagcctcacgtgatctgctgacctccacctcccgaggtgctgggattacagacgtgagccactgtattttattttttgagacagtcttgctctgtggcccagactagagtgcagtggtgtgatcatggctcactgcagcctcgacctcctgggctcaagcaatcctcttgcctcggcctcccgagtagctgggactacaggtgtgtgccaccacaattggctaatttttgtattttttgtagagatggggtcttgttacgttgcccaggctagtctcaaactccggggctcaagagatcctcctttctcagcttcccaaagtgctaggattacagtcttgagccacggtggtcagccttaatttttttattttataaattttttgtggagacagggtctatgcccaggctcatcttgaatacctagccttaggccatcctcccgcctaagc[133 bp omitted]cctccgcctcccaggttcaagctattctcctgcctcagcctcccgagtagctgggattacagatgcctgccaccatgtccggctaattgttttgtatttttaatagaggcggggtttcaccatgttggccaggctggtttcgaactcctgacctcaagtgatccacctgccttggcctcccaaagtgctgggattacaggtgtgagccaccaggcccagccctagtttgggctttttaacctgcagagctgtgggagcgggatctggggggttttatgaggatgtcccctacctgagtgcagagtagagaaccggtccagtgaccagcagggttgggggaggatcacgctgtttttgtgtgggggaggttcccaaagccccaggcgcccccaggagatggtctggctgggaaaccttcagagctagggctgctgtgcccccaggagatggtctggctgggaaaccttcagagctggggctgctgtgcccccggtagatggtctggttaggaaatgtttaaagctggggctgctgtgcccaatgcacagcttgagaaagagactgggagaggtctgtactgatctaaatccacactgctgcctacccctgcggggcatgagggcatctggaatatggtggagccagctagtctgcgtagacattcccggctccctctctgggctaaaaataggagccccctcactgcaggcagctgccatcctgcatcccctcacccccctgcgcggcccctttgggggaagctgcagccagctacccggatcacagcttcctcctgggaaacgggtaggggctctacccttcctgccctgggggtaattatgcccccaccctgtgcccttccctttgaacaaagggcagcctaatccagaacaggatggtgaaagggttgaattaacattggcccattttatagagggataaactgaggcacagacaggcccatgcacctgccctccaggtgcctttcgggtctgctggcctccaggtgctccatcgtaggtgggagggacttcctgcaccttcagacctgagctgggtcctggcccgagaagggggtactcccacacccctttatcccgctgcagggagcgtctctccaaagcacccccaacctggggcaggtgtctcaggcctctccatcggagataggggtggcagctgggtttggtgtttaatatagccttatggtggaggcctctcagacacctgccgccattaggttacacgtggccctggggctggaaggctggattcaggccttgttgtcgggggcagctctcctgccggcagttttttgttttgttttgtttttgaggtggagtctcactgtgtcacccaggctggagtgcagtggcgcgatctcggctcactgcgacttccacctcccggattcaagcgattctcctacctcagcctcccaagtagctgggactacaggcgcgcgccaccatgcccggctgatttctgtatttttagtacagatggggtttcaccttgttggccaggctggtctcgaactcctgacctctgatgatccgcccacctccgcctcccaaggtgttaagatgacaggcgtgagccaccgcgccggccccggttgcagttttgtggagggaggaggtgcaactaggtggaaggacagagagaaagttgcaatgccgtgtgctagtctagggaaaggggagggagacgactacaaccccgcccccaacactcaggaccggggacccgagcccgccagagaccctccacaagtgagggtcccccggggtggcccctgcccgccctccaggctcccctggggctcacgtccgggctggagcctgggcctctgcgcttagccccctggggtcgcttcccgcgcacacagctccctgcagagcacgcgtccccctcccgaccgccttccttgcaccccgctcggtgcctcagtttcctgctctgcgcagtggcgacaagaaggttgccaactacagagaggagtgagggctggagacgtgcagggacctccctggagggaggcgcggggcacgtggttgggcaagcgaccgctcagaccgtgtaagtcatcaccaccttcacgggggggtggtgggcagccgagctcccgacgctggtgacagccgggccgggcagggtcgtcctggtttcacaaaggggctccgggtcccagcgcgcacctccccacgcccgcgccgagcccccgtctgcagcccgtccctccccagagggaggccggcgggaccctggttccctccctccgacgccgcccgcccagctctgcaccgggtctttcaagcccatttctcagacttggaaacggcggctccggagagtgaagtcactctctcagggtctctccgtctaaggggcgaaggtgaaactccgagtccacgaggcccagcgtaggtgctccgtaagaagggaagagacttggtcccggatctggctccgatgcctccggccagcccgcccaggcggagccccagtcagtcccctcttcttcccccggggcgctcccgccccagcccctgcccccggcaccctctgcgcttggggccgcgtcgcgcactttgcccaccgtccctaggccgggggcggggcctcccgcggcgctgttccccttcccgtttattatttattatcctttaaaggggccgcgacctgaaaatttccgtccactctgcccggctccccagcgcccccgggctggttgcgcgtcgtcagaccgcgggaggggggcgagggggcgtgcggggaaaagtggggagccctggcgaggccctcccgcgcccgggccgcggcgctgaatcaccggccaggtatttgcatccgagagcgactcgtcccctggtgatttgtctgggggtgggggaggggcggggcgggggccggccgcgcgcggggcgcctcttaccaatcgggcggaggggtgtagacgcggacgcggctggcggctcggtgagtcggcgcgcggcacagccccgtgggtcgggggccgggagccagcggcgcgcaccggcggctggaagccaggcgggcccgggcaggccgaccccaggcgcggggcgcgcgccccactacgagccgccctgcgcggtaaggctggggagcgcgctggccgttcccagcgcgggttccggtgccggggtgggcgcagtgcgtcctggaagccaaagaagggggtccccaaagttgggcggagatgttggtgggggtcccggactgggaaggcggccctggcgggctggggttcggggagttttctctgcaccccgcttggagacttcactccccactggatcaatcgctcaggggcgagcaggggcgatcgggggtcgcgagtgcgcgcccccccctccccagcggaaggaaatggtctctgcgcgcgcgcggggggctgcaccccgatattttatttcatttttattctttctccccgaaatcagggatttattcgggagcccagagaggagggagggtagttcccggcgagcctccccagccgggctggtttatttataaagtgtccgccccagcgcagagaggggcccccgggggagacaccgcggcccccgggcgccggggtgggttgggcccgggcgcccggttcctcggcggggatacccaggaagagccccctgacccgtttcagggccccccagacacaaaagcgggcgcaggaagcgctgggagcgcgcgtttgtcaactccaacgctcggcgccggccccgggcggcgggttcaattatcttccgtttttaggcgctcgggctggaggggttcccccccccatgcaaatcggccgctttccaagaagcctttgaaatccggaccagggtttctgtcttcttatttcttctccttcttgagtttttttctcacttcctccaggcccccccaacccaggactttcttagccccctccccagctttctgccccgcccctccccctcctcttcccttcgtggagtgaggggcccctttcgccacccgcgggcccggggccttgcacaactctttaaataaccatgttttgcaaggcccgcgccgagcgggtgacctctctccggaggcctggggggaggagggtgtggcccaggatccctccgccccccacccctgcctggtccaacgaccacccagcgccccgtcccagcctctcccttggggctgtcataaaatgggggtgggggtcgaggacaaagggctcttggggggaggggtctgaagggggtgggcgtagctagtttagggttatggcggcgatgggggggcacccagccctgacctaggggggaatctgggatccccacctgccccctccaccggccccaacgtggaggtctgtcctgctcccctcccccacccggcgacccggaagggtcattaaacccagcagggctcggagcgggctggtggggggagtggcttcctttggcctcttccttctgtgcccccaaagagggggggctttgcttggagctcttccgtggggggggccttgtcttgaagttgtcccaggtgggggaggggcgacagacccgaccagaccctgagtcagaaatgccccctcagcactttcttgggttgggtgggtggggggtgacctccagcctggggatggggggctgggtgccgccctggtggcctccggaccgccaggctctcctggtcacaacccagcgctatggccctgaggtctttgtgacctgggacctctgtccccacaacagatggaacagaggctattttggaacatgccctcctcgctttctcccaggggccacccacctgccccccactgccttttcacccatggggccgaaagactcaggggtctgggtaaagggtgtctagggcagaggggccacaggactctcttgtccggtgactggggaggcttgggggtgtctgctgtgcaacactgacctgggtggggtcgggtcacaggagggatctgagtcccaggggtccctgcctcctcgtctctccaggccttgtctgcccaggagctgtgtatgagtcttgggggctcctttgccagggtaagggttgggggtggcctcctgggcccagctgcctctcgggagggtggagctttgccccctccgctgtccccatgatgtgccttccctctggggtgtcactccaggcctgttgggttctgcccggcctgttttattggcggcctgggcgggtggaggtgtggcctgggctagggggtggctcgggtgggacccaggccccaggagtctctgttcttcacccaggccattaggactggccctgggtggaaggcactctaggctgggtgagtgtgttgccgtccgagacatctggcccactcgggatcccagaggaccgggaaactccagacccctgttgccctgcagagattgtggggtctgcgtgggaggctctgtggtcacccagacctgggttcaaatcccaccgccatgtctccaagcagaggatccctgagcctcagttgtcctcaaccatgaaatgggaccgccctggtgcccccttctctgacacctgttggtgcccaccttaacctcctgaactcgattcatccctccttgagtgccatgggttgggggggtactgttacccacactgttttgcaggtagggaacctgaggtccagagaagttgtggcttgggcgttgctgttgagttgtgtgatggggggagggttagcccagggcccgtatacaacaggcgctcaatctccagtctggcctgagatgggaggatacctagatacctggaggccaggctgggccgctccaacagggactcaggcagcgactggaacttagaacccacctgactggggcccggagcccgctggccaatcacaggccaggaacgcccattcccccaccctgcttgtgaagcaataatccaagatctcctggggcagacagtctggccacagcgtgtttctctgtggccccgtgcggggcgaccttgctacccaggcccacagtaggctgtatgcgaagagcctgcgcctctgcctccaagaaggcctccaggtctgcatcctgcatgagatggacatgagagctgatccccagggccttcatggggaaggaaggagggggcttgaggagctcaggcctgctctgactgtgccttttttccccctcaggtttctgcaaatgcgtgaatgagccggatgccagcctctgtcccctggagcccagcgtgaggaagaggcatgccccatcagccttcagcttgagcccggcggcccccgcccccgccccctgccaccctgcactgccccggctcccccgcggcccccacgctgcagtgcggccgggccccctccccgcaggggccgcccccgccgcccacccctagcgcccgtggtggtggtggtggtggtggtggtggtggcccgggccgcagggccatgaaactacaggccgtgatggagacgctgttgcagcggcagcagcgggcgcgccaggagctggaggcccggcagcagctgccccccgatccccctgctgcaccccccggccgggcccgggctgcccccgacgaggacagagagcccgagagtgcccggatgcagcgggctcagatggccgcactggcagccatgcgggctgcagctgcgggcctgggacacccagccagccccggcggctctgaggatgggcccccaggctcggaggaggaggacgcggcccgggaggggacaccgggctcacccgggcgaggcagagaagggccaggagaggagcactttgaggacatggcctccgacgaggacatgtgagttggggtctggggcagggccttctgggggctgttactggctctgagtgtcactctgctcatctgcagaatgggagtaagggtcaggtcgcgggatctccttcctgtaattccagcagtttgagaggccgacgtgggaggatcacgtgggcccaggggttggagaccagcctgggcaacatagcaagaccccatctccgcaaaaaattaaaaaattagccaggcatggtggtgcacctgtggtcccagctactggggaggctgaggcaggaggatcccttgagaacagaagttgagttgtgattgtgccactgcactccagcctggatgacagagatagacccagtctcaaaagaaaaatggtttttttagccgggtgctgtggcttacgcccgtaatcccagcactttgggaggtcgaggtgggtggatcacctgaggtcaggagctcaagaccagcccggccaacatggcgaaaccccatctctactaaaaatacaaaaattagccaggcgtggtggcagaagcctgtaaacccagctactcgggaggctgaggcaggagaatggcttgaacctgggaggtgaagattgcagtgagccaagaatgtgggttttttttttttttttagacagagtcttgctcttttcgcccaggctggagtgcagtggcgtgatctcagctcactgcaacctcctcctcccgggttcacaccattctcctgcctca[221 bp omitted]ccgatggctacagcagattcagcggcaggggcagataaaatctgcagccggctggacctgcatagcgtgtgggtccccccagggctggctgagggctcacttgctgtgggatcctggcctccag[141 bp omitted]tgaggccccatttctacaaaaagtacaaaaattagtcgggtgttgtggcatgcatctgtggtcccagctactcgagaggccgaggcggaaggactgcttgagctcaggaggtcaagactgcactgagctgtgatcacaccactgcactccagcctgggcaacagagaagaccctgtctcaaaaaacaaaactggccgggtgcagtggctcatgcctgtaatcccagctactcaggaggctgaggaggagaatcgcttgaacctgggaggcagaggttgcagtgagccgagatcgtgcctttgcactccagcctgggcaacaaagtgagactgtgtctcaaaaaaaaaaaaaaaacaaccaaacaaaacctagcagca[183 bp omitted]gtggtggcgggcgcctgtagtcccagctacttgggaggctgaggcaggagaatggcatgaacccgggaggcggagcttgcagtgagccgagattgcgccgttgcactccagcctggacgacagagcgagactccctctcaaaaaaaagacaaaaaaaaaaaaacggctgccaagaaagtctaggagggtgccgtggaggggcagtggcgagggtggggcggatttcagatggcggtgggagaattctccctgtggagggaaggggaggtggagctgggacagcatgcatggtgcaggatgcaggaaccagcctgccgtaatgattccctttttttttttcccaagagagtcttgctctgtggcccaggctggagtgcagtggtgccatcatagctcactacagcctccatctcctgggctcaagggatcctcccgccttggcctcccagagtgctgccgggattataggtgtgcgccaccgtggctgcctgcgtgatgcttttcaaggccccaaaattcacgctgtagggacggcttgtgctgttctgggctaattggaaacaaagtgggcgtcacgggtgccccacgctgtgctcatgagcgctctctgcagtctgagctggcggcggccggctcttcctatttccagagagggaaactgaggctgggcggggagtgggtctttccttgggctgggacgagccagcaccttctcccctgactcctgccctctgctcaccccaggaagcccaaatgggaggaggaggagatggaggaagacctcggggaggatgaggaggaggaggaggaggattacgaggatgaggaggaggaggaggacgaggaggggctgggccccccaggccctgccagcttgggcaccacggcactgttcccccgaaaggcccagccaccccaggccttccgcggcgatggcgttcccagggtgctggggggccaggagcggccggggcctggccctgcccaccccggaggggccgcccacgtagccccgcagctgcagccgcctgaccacggcgactggacttacgaggagcagtttaagcaggtgagtgggcgcgtcccgcgtggcggctgaggcacctgctcctgggccagtggggccctttgaaggcccacgttgcacggggtgtgtgctgagccgggcgtcgagttgagagctgggggttcctgcggtagctgtgcttcctgtgcttccctcctgggcgtgggctcgaccagctggctgttcattgctctgatgtgggatgtgtgaggagcacccggccgggtaggagaaacctggggggctccacggcccccatatcggaggtgatggggcagagatggaaaggtgggcctgggagggagaggctggcgccggcccgagctgggcttgggttggaggaaccaggcctgcgggcgatgcgggcagagaggccggggccttggtgacgtggtgacttggcctcctctgtcccctggcatctgtggagagccgtggggggttgcgggctgcagctggcagccgaggggatgtgggggtggctcaggtgtggctgcaggagacgcaggagccagggcctgtgaggctccgagtgggcggttaaggctggggccggcagggggtctcagggaccccaggctgaaggaggaagtaggggccgccccagcctttccccgcaggcggccaggccagaggaagtggccgggcgggggatgctttgaagttgggccgtgctgggccgggcagatggaaaccagatggtggccaggctcacattccagccctcgtccagctgggctctgcctcgacctctgggcgcggctggggggagccacctcctcgcccggggctggagctggtctgggctcccgcagggaggtggatgatggacacgctgggacatgcctgcctcggggcagccccttcggccctgggcttccagaatccgctctgaggagcctcctaggaggggccaaggcacagacacccaggggggcctccccggggctcctgactccaggggtgccgggtagcttaaggggcggccctaaccccagcagccctcaagagacttaaggttgggctgcctggaaactcacaaatagtaaagagctgaaagccggacacggtgtgggagaatggccagggcagcggcggggactcggtggggggggggggcgtctcgctgattccaccctgctctgtgactcagtttcccactcctgcagaaggggatgctccacgggccacactgccgcgcgtcccattctgccagtgagaaaacagaggctcagtgttgggaggaggggtcttgtgatcttttctgggtttaagatgatacggatgagcatgctgagagtggattctctttaatttcattaatttaattcaccaattaatttaacattcacccaatattcgccatctgcccgggactcagcccgcagggagccctgggctggaggggcgggcaggagccggacggagacctccatccccgcagggttatagccaagccgagagggagggtcaaggccccccattcagtcggtccttcgggggtcagaggtgaatgggaccccctgaccctggacacacgccccgcccagacagccccggcctccaaggcccaaagccgatgggggagttttggggtgactggcccagaccaggcagggatgaggggccaggcgccctgaccccacagcccgcagcatgtcctgagcgaaggcaggaggcagaagccactgtctaccttgtctgggcgacaccgcgggtcagggttgtaggtgccatgtggggtttttctgcagcgggaagccgagatggggaaactgaggccagtgcagggaggggggtcactgtgtcaccggcagcctcaggtattcctggagatcctgccgccccgcacctgccccctgggtgtaccgggcagtgcagaggccctgaggtggactaaagctcggcttgtgtgtagggaccgggtgccgcctctgggtcttgcgggagacgggattggaactccgagaagatgagggcctagggatggtcgtgggcagcgggggtggggggaggcccccgccctgcagtcctgtgacttttttttctctagagaagggctttcacggtgttgcccaggttggtctcaaactcctgggctcaagtgatctgcctcactcagcttcccaaagtgctgggattacaggcctgagccacggtgcccagccagtcctgggatcttatcctgggctgttcgtggcaggtccagccgccgatgccgccgcccgcccagctggccagacacctgtgttcccagtgtcaacagtggcctgggcccaaccagcccagtcagtgttacctcccgcccggcccctactggggcccctgttgactctggcgcctgccccacccccttcctggcacgtggcaggcctggcccgctggccggccgcttggcaccgtctctgcctcttcctcccaggtcctggcagggctcggggctaacttccgcctgcaaatcctcgacagctgtgaaattctgctgtcggctgcaggtctggtgggtggccaggccgcggcggggggccgggcgcagcaggctcagggccacgggttctttccttggacacctggaaccttgctgcctggggcctggggacgtgcagttttggaggccagcacgtgtcgggcagtgattaggatctcagcctcctgatgtctgacgtagcctcctggtggcctcctgtcacccacacagcaggcccagcttctagaaagcggccacggtaggattttattggattattattatttttgaggcagggtcttactctgtcgggtaggctggagtgtagtggtgctgtcctaactcactgcagcctcgatctcctgggttcaagcgatccttctgcctcagcctcctgagtagctgcgagtacagacgggcgccaccaaactcagctaatttttgtagagacggggtcttgctat[143 bp omitted]ggagtctcgctctgtcgcccaggctggagtacagtggcgcgatcgcggctcactgcaagctctacctcccgggttcacgccattctcctgcctcagcctcccgagtagctgggactacaggcatccgccaccgcgcccggctaattttttgtatttttagtagagacaaggtttcaccgtgttagccaggatggtctcgatctcctgaccttgtgatccgcctgcctcggcctcccaaagcgctgggattaaaggcgtgagccaccgcgcccggcccgtgatgggattttacacgcacaggcggttaatcacagatcttcagctgcttaaggatttgaacctttagtctcaacaattctaataagtgttgaatgaatttgagatgaatcttaaaaaacagctttattgggctatacttcatatgccatacaattcactgttttaattgtacgattggggccaggcacagtggctcacacctgtgatcccggcactgtgggaggccgagatgggcagatagcctgagcccaggagttctacaccagcctgggcggtatagcaagaccccatctctacaaaaattagctgagtgtggtggcgcacacctgtagtcccagctacttgggaccctgaggtgggaggatcccttgagcccaggaggacaaggctgcagtgagccgtgatcgcgccaccacactccagcttggtgacagagcgagaccctgtctcgaaaaaataagaaggatagggtggg[138 bp omitted]gcagcacgcgcctgtagtcccagctacttgggaggctgaggcaggggaatcacttgaactcagaagcagaggttacagtgagccgagatcatgccactgcactccagcctgtgtggcagagagagattctgtctctaaataaataaaataaaataaaccctgaccctttaactattatccccctattctaccagcacgccccagcccctggcaaccacacatcccctcctgcctctgtggattggcctgttctggacattttatagaaatgggatcacatagctgggtgcagtgcttcacgcctgtaatccctgtactttgggaggctgaggtgggcagagcacctgaggtcaggagtttgagaccagcctggccaacacagcaaaaccctgtctttactaaaaatacaaaaattagctgggtgtggtggcgggcacctataatcccagcactcgggaggttgagacagaaccgcttgaacccgggaggcggagattgccgtgagccgagatcgcgccactgcactccagcctgggcaacagagggagactccatctcagaaaaacaagaacaaagaaaagaaatgggatcacacactgcgtggccttttgtgtctggcgtatctcactgagcgtgacgtcctccaggtgcatcagcaccgtggcctgggtcggagtctccttccttttcacggctgagtcatactccgctggatggatgtgccgtattgtgtttgcccgttccgctgttggtgaccactcgacctgtttctgccttttgggtttgtagtgctgtacacgtttttatgtgggcgtacgtttgtattacttttgggtgtgtatctgggagaattgctgggtctgctggtgactccatattcacccatcagaggaactgctagactgtttagcaagcagctgcccacgttaccttcccaccagcca[137 bp omitted]acctccacctcccgggttcacgccattctcctgcctcagcctcccgagtagctgggactacaggcacctgccaccacgcccagctaatttttttgtattttttagtagagatggggtttcaccgtgttagccaggatggtctcgatctcttgacctcgtgatccgcccgcctc[134 bp omitted]tcagcgtcccagagtgctgggatcacagacgtgagccaccgcgcccggcctgttgtcgacttttgatcctagcctccttgtgggggtggcgtggtttctcactgtggttctgattttcattcagtgtcaggatctctccctctgctttccaaagtaaagcttgctgcccatgtaacttgcagatgagctcagaggtgtaggaatgacggcactagccggtatctgttgcttcactgcgtgaagaaagtgactgagtgttttagatgggtcgtctcccagatcctcactggatcccaaggagctgccgttgaacctgttgtgcagacgagaaactgaggcatggggtgatcacatgacttgtgcacagtcgcccgggggacgtgtcagagctggaatttgacccccgggatgcacctgccagagaggacccagcggtgtgtggatggatggcccagggagctgctggtgggacggttttggggaagctcagctgcccctccgtttttctttttgtctggaatgaaagtggttagaccaggccagacctcagtgctgtcctcatatccaggcctccgggcctgacagctgggcgtgtgtgggcactggggcagggacggccaccagcagcctctcaggctcaaggccagacacacctcgctgggcccagccccagagaccgctgggtcctcaccacggtgcctgccaggcagctctcgggagtgaagcgagaccccagcaagaaacgggcatccggtttttggtctttttttggtcttttcagctcatttgttttttttaattgtggaaaatacacatagatacattattttatctctcttttttttttttttttttgagacggagtcttgttttgtcacccaggctgcagtgcaatggtgcaatctcagctcactgcaacctctgcttactgggttcaagtcattctcctgcctcagcctcccaaatagctgtgactacaggcgcgtgccaccacacctggcctatttatttatttatttatttatttatttattattattattttagacggagtcttgctctgtcaccagcctggaatgcagtggcgccatctcggctcactgcaacctccgcctctcgggttcaagcaattctcctgcctc[134 bp omitted]gcctcccagagtgctgggatgacaggcctgagccaccgcgcccggcctctcgatacacttttggttccagaagtaacacttgacactcttcttgcagagaggaagaaaatggaacgtttacagggagccccgagtccctcccttgacctctagggcatgagccgcatgttctccaggcctttctctgcccactcacacccaggaatgtgacctgggaggtatctaacgtgtgatcttccgggcaggtcgggaggttcctcccgccgctgccttcgaggagctgtttatcttgggtgcgttcgcgtcgtaattgggatgttccgagccacctggttcttttcagctgtatggacgttcccctcgtggcgctggacacccccacgtccacacacttccctcggtcatttccctgttgtaagcaatactgtaacgaacatcttcggggcgtgagagttgcttggagcagtgtggggaggaggtggggagctggaattgccagggctctgggagaatcggcaacacgttttcttcgtcgtgccccggagacccccagactggtgggagacagagctggatgtgaaggtagcactggggtctgccgtggcctcgccacgtccatttcagactgaggcttaggggcgctgctgggcttccccacatccctcgaggggtcagggctgggctagaggggattgagggggaggctgccaagaggaaggggcattggggctggggctttgcaggatgtgtaagagtttgttagcgagccacagcagggcagggcctgcctctgggatcactgtgactggagcgtaatgtgtggggccagggtggccaactttttggcttccctgggctacattggaagaagaagaattgtcttggaccacatgtaaaatacagtaacactaatgatacctgatgagccaaaaaaaattgcaaaaaaactctcatcgtgcgctaagaaatgtacgcgtttgcactgggccgcatttacagccgtcctgggccgcgggtcagtcaagctctcggtgtagcaggaggggtgggcagagcttgagggcacttggcagggtttggagctgggagaaggaggctgggaggacccttctggagcctgttttggagacagaacggaggcacccttggtccaggcaggagtagaagaggccaacactgcagctgggcttctggggcctgagaagaaggagaaggaggagaattttcccagcacaggcgggtgctctaggcagatggtgcagctggggcctttgcccagaggtcaggcagcaggttccgagcacacagaggcagcggctgtgtttgagacagagtgtgtttgtcaagagagccccgagccaggccctcggccgccagccctggtgccggcgtcttcctgggcctccgggagccccggctgcacgtgagccgccgggagggctgtcgggaagccccctgggcacctggtcctccccaccggggcagcgcccgcctcatcaaagccactgtggctgctggcgccgggccagctgggccctggcgggcgaggggtgggtgggtgcccgccagcccctggcactgtgccccggcccgtgcccgtgccaggagcgtcgctgactcagccggaagagccttatctggcccctgcgccaccgcctggccgtcgggtcaccgccgcggggtcaccgccgccgcggcctggccccacgcccaccgccggcgtcccaccctggtggctgctgccaagcgccggccccgccccatgctttctaataacacacgcggcagcccgagggagcggtgcccgcaggcagagagtgtccccgcgtggtgcctgggcgggggaatgggcgtggtgagccgccgtggcgtgcgtgcgagtgtgcacgctggggctgtggccgggcggctcgtgggtcctgtctcgtgggaccctgcctgggagggaatcttgctccagacacagcatcttcggaccctccaaggcctctgcccaccgggcacctgctggattctgtgggtctcgtgtgtggggctgtgtgcacccagccagcggcacctcacgcgcccgcctgcgtgtccccagccagcaccacggtgttcgtttaggtctctgtgtgccgagtgacgtggcaaacttcccacgtccctgttttgcgtggacctgttggtgagtgtgtccagacgtgtgtctgccctgacgtcctttgtgaatgtctatgttggggtgatgatctcctgtgtgtgcatttttttaactataaagatggggtcttgccatcatgttgcccagcctggtctcaaactcctgggctcaagtgatcctcccgcctcggtctctgaaagtgctgggattacaggcgtgagctgctgtgccggactggtctcttgtgttttgtgtggatgtggctgtgtgtgtgtgtgtgtgtgtgtgtgtgtcaggggtggctgcaagcgtatgtgtgtgtgcacgtcgaggctggagagtgtgtgtccaaaagcgtgcctgcttgggctcgccacgtgtgcgcacgtgtgcccgtgacagacgaccttcctgtgtgcctgagcatttgggagcctcgtgctggaccctgaagcatgaggtcgcggtggggcctattaaccattagacccccggggctgctagagagtggcgctgtctgtcttggtcagcagcgcgcgtcggccgcggggcacagatcagcgcctcccctgcccgccatgggctctggagccagcctagccgatgatggagccccagtggccaccgagctatggacagggccgctgggggtgcacccccaccctctccgaccccgaggagctgccggcagagccctgtccactcttgcctcagtttccctgctggacacaaagggctgaagtccaggtcccttcgatggcccaaattacctgactgtcgatcctgactggggcggtggcgacatggcccccgcagctgcccggcggtggcacccaggggcgtcacccacgagggacgcttgactcaaggtcctctccactggccgccgggagccgggccgggagccgctgcggtgccgacctggtgggtggcacacggggggcgggtgcggaccgcctcttctccgctctgccggctgcacatggccagaggacaattgggggtcacagggttaaacgctgactaatctggccattgaaggcccaagcgccgggatatgcagccttgccccttggtcagggctgggctgggggtccgtgggcacaggtgggtgggcagggagtaggtggaggccgcccctcccactgccccgcaggccctggttctggccaggctcaggaagtgagctccctggggacccaggccccatgtccagaagccacgctggacatagtgcccagattccatgcccagcagcctcctctgccaccctcagagacggagaacgtgagagcaagtaagaacccgccttccgggaggagccccgtctggattggatggcatcgcccaaaactcacgtccacccagaacctcaagatgggactgcatttggaaatagggtctctgaagatgttagtttcagtgaggtcctgcagcgtacggtggccccaaatcccatgccggtcggttgtcctctaagggggaggtcacacctgtgatccccgcgctttggaaggccaagacgggagtttcgcttgagcccaggagcttgagaccagcctcagcaacagagtgagacccctgtctctacacaaattagctgggtgtggtggtgcgtgcctgtggtcccagctactctggaggctaaggcaggaggattgcttgagcccaggaagtcgaggctgtagtgagctatagtggcacgactgcactccagactgggcgacagggcaggaccctg[212 bp omitted]gaggcaggagaattgtttgaacccagga[132 bp omitted]tggagacagaggcagaggctggagcgatgtggccacaagccaaggacacctggagcccccagaagctgggagaggagggaaggaccctcccctggagccccagtgacacgctgatgtcagacttgtggagagaagaaacctctgctgacgtggcaccgtgccctgggcaaggttagggcagaaacaccaggctgtgcctccctgggcacacatgtgtctgagcccgaccctttcatgggcacttacggagcacctgctgtatgccagcccgaccctctcatgggcacttacggggcacctgctgtatgccagcccgaccctctcatgggcacttacggggcacctgctgtatgccagcccgaccctctcatgggcacttatggggcacctgttgtatgccagcctgaccctctcatgggcacttacggggcatctgtatgccagcccgaccctctcatgggcacctacagggtacctgctgtatgccagcctgaccctctcatgggcacttacggggcacctgctgtatgccagcctgcctgcgtactggggacacagccgtgcatgaagcagaagctcctgccgccggcactggagtcctgacgtcggcagcgcggtggagggcgggcctgtctcgccgttatctcccaggcgtgtctgctccccgtgtgtctggctgcaggggcgcgtccagggggtgtgtgtgtgtgtgtgtgtgtgtctgcgtgggagtgtctggctgtgtggctgcacggaggcctgtctgggtaggagtgtcggtgggggcggtcccacacggccatggtttgtgtctgccacggcctcagccccgttgcttcggtcgatgcccccaaaccttgacccatctcaggggcaccacgctcactgctacaaatgtgggtcttccgggcaagtgagcgtcccccacccaggacccccgaccccggccctgggagggcccgactgccagcctggctgaacctccttcattgtctggttttcgggggtggattttgagacagggtctcgtgctgtcacccaggctggagtgccgcggtgcagtcatagctcactgcagcctcgacctcccgggctccggtgatcttcccgtgtcagcctcctgagtagctgggaccacagacactcgccaccacacccggctaacttcattttattttttggagacagggtcttgctgcgttgcccaggctgaactcctgagctcttaggggagccgggatgtccctgggtcctgcggtcgctctctgtctccatctcttctttctcctctcccctctccctgtctctgccacccgccccgtcccttccaccacgtcgccctgtaattcttccctgacggccatttttccgggagtggctgggcgtctctgccctagctggcgccctgcccagccactgcccccacccctcagttggccacatgcccatctcgtgggggcccttggacctggttcttggggaagaactagacagatcacctctgtggttattcattgctttaatgccacctggggggagagagcctgggcacaccaacatgcagagatcccagctctgcccgacctgggcctggtgcctgtgacctcctcctctcggcctcagtttccccgcccgtaagacggggatggtatcagaaggagtgcagctcttgtgactttgttttcatccttggcctttacggttcaccaggtttctcctgtaactcctgtagagaggggacggcgtgtggcatggcccctgctgcctgacccagcccacctccgtctgctccctagcggggaggtgtccagggcggccccagcccacctccgtctgctccctgcagcgggtgggatggtggggtgtccctggagcgggcagagccttgagtgactcctccgaggctgctgcccatggtaggggcagttcctgtcctgccctcagcctggggtctggcagaagctccggccaggtgtaccccaagggaccccggaccctgagcccaccagggagggcccttcctcttgactctagggtgggaggtggaagcagccccttccttcctgcagccgtctttgggcccggactccaggcaggcccgtgtcccattgtggggacggcgtcgacatggccggggcaggcgtgttctggccccttgcactgcccggctcctgctgctggtgctgggctgcgtttctgttcagagaacctgggctgggagtgatgggaccgcagtctcccaccaggtgcctctttccaaatggacactcctgctgggcatgacacttctgaggctttctgggaccgtccaggtcccgtctgcagggaaccccaggacggagttaattgctgagtgcccagctctgggcaaagtgcttggaccctgcggttactccgagcccatttctcagcagggaaaaatgaggctcgcggaggcaggggcccggcgtccaggtgggagcatgagggcgtattgtgggtgggctggccggtctggggggcggggaccctgtacagaacgccccggccgcgtggagtggcaggttcgtcactgcctgggggaggagaacactgggtatttcatttttatttttttgttttttttacttttactttttcctttttatttatttatttatgtatttatttatgagacagagtcttgctttgtcacccaggctggagtgcagtggtgcgatcttggctcactgcaagctccgcctcccgggttcaagcgattctcctgccttagcctcccgagtagctgggattacaagcgtgcaccaccacgcccggctaattttttgaatctttttttttttttttttttttgagacggagtctcactgtctcccaggctagagtgcggtgtcgcggtcttggctcactgcaagctccgcctcccgggttcacgccattttcctgcctcagcctcccgagtagctgggactacaggcgcccgccaccatgcccggctaatttttgtatttttagtagagatggggtttc[144 bp omitted]ttctgtttgtttgtttgtgtgtgtgtgtgtgtgacagggtctccctctgttgcccaggctggagtgcagtgatgtcatctcggctcactgcagcctcgagctcctgggctcacgtgatcctcctgcctcagccccctgagtagctgggattacaggtgcgccactatgcctggctaatttttttttttttttttgtaaaaacagggttttgtcatattgcccaggcgggtctcaaactcctgggctcgagcagtctgcccacctcggcctcccacagtgctgggatcaaaggtgggagccactgtgcccagcccacactgagattctgcattgaaatgtttgctgggtgccccccattgctgggcaccgtggggtggggtgtgtctgtgtgtggcctggggcaccccctgccgtcagcccagatctgtgtctgtgtctgcatctgtgaaacgggtttcctggcagatagaggggctgcttaaggccagtgccctcggcggagactctattagggactgcgggccccagatttccacgtcatatctcgccgccatggggctgcctcctgcctcctctgcaccaactttctggaagtgcctgtcagctgatcccaccccggccacatctcagcaccaggcctgtcgctgccgtcctggactcgtgggcctcagtttccccaactgtgaaacgggctggcggccggtcagcgtctcctccctgagcaagggactcccccatccatgtctcagcccccacccagatgccccgggaccgtttcacagatgagaagaccgaggtgccagggtggcgatcgcacgaagggcccgtcacgggagaatgaggagggtctggcgtcagcaagctcccccggaatctcgtgatctggaaatccacagagaagcaccttcaccacgccagcttcccgggccgcgcttcattgtcatttctggagagtgttattaatatccgccccgtgggtgcggcgctgtgtatttccagagaggggactcggggcccatcagggccgggggagtggagccggcagatgttcggccctgcccagaatcacttccccaatttccccacgcccggcggggctctcagcatctgcatccgccgaggcctggctgtgctgacgggaattgaaaggacctcgtggcttaggcaggcgggggagccccccggctggtcaggtgcacgaggagcaacccatggccaggcagagcccagagagggcggggaagggcctgaggtcacacagcagacgctagctaagtaagcgcctgctgggtgtgggtgaccctgccctcccccgacccatcagtccaggtcggtcggggccgcctgtcccctggtgtttcccttcacagcccacccgccccagctgacctcttcctcctgctccctgaaccgggaagtccgggccctttttggacactgcatctccccagcatacaagatagtccaggacacacaggaggtgctcaataatggctgcagagtgccctgtcctggcagaaacgctgtggactgacagccccgtgtggctggccctgtggtccacgctcagctctgctgcctctgtcagtcctgggagtttccgggacgggaaaaacagcgagattcaaaatcccccggcctcccggggccgcggtcctgcggggccacagcgccagcttccgcttcttgatggcttcggccccacccccaccatgggtaaactgaggcccggagaatgggcagactggggcgcgagactccaggtcctccaggtcctcctgccccccgtgccctcctcccgcctgcagccccaggctctgctccgtcttcattccttcttcattcctgcctcatctgtccagctgttcatt[131 bp omitted]actgcaacctccgcctcccggattcaagtgattctcctgcctcagcctcccgagtagctgggactacaggcgtgcgccaccacgcccggctaatttttgtattttagtagagacagggttttgccatgttggccgggctggtctcaaactcctgacctcaggtgatccgcccgcctcggcctcccaaagtactgggattatgggattacaggcatgagccaccgcgcgtggccatcctggagtctacagcagtgatgtggctgcgggggtgcactctggccgcctccttcccgcctctccggactgtggacaagtgaagggctttgcaggttgctggtactctgcaaacctggttaccagagaggtgtggacccctccctgcctcagttccccaaatgcagagcagggccccaggggtgtggggaggcagtgctgggtcccgccctgcccacccctcccagcggcggcgtgggtgcctgtgtggagggggaggtgccaaggcccccagggaccctgcccacctggggagcagcagccgcaggtgctgagtcatctcagcctctgccccgggcctccgccgtgccagatagcaggatcatcaggcctccgggagggggtggggggctgggggtgctgtcagtggatgggagctgccaggagtggggcttcagagaggggccggaaaggggacaccagcattggaggaaggaaagcttcttacggcctctttcttttccttcttcctccaactcctggcctcaagccatcctcctgcctcggcctcccaaagtgctgggattataggcaggagccgccgcccctggcctttcccctccctccagtggatgcctgctggattcccgccac[136 bp omitted]cacctcagcctcctgagtagctggaattacaggggttcaccaccacgcccggctaatttttgtatttttagtagagacggggtttctccatgttggccaggctgggactcctgacctcaggtgatctgcccacctcggcctcccaaagtgctgggatgacaggtgtgagtcaccgcatctgggctagattttgccttgatgggtgggaggtaggcaggaaagatgcaaagaggccgtccccagagtgaacggatggatgaggccgtccccagagtgaacggatggatgaggccgtccccagagtgaacggatggatgaggccgtccccagagtgaacggatggatgaggccgtccccagagtgaacggatggatgaggccgtccccagagtgaacggatggatgaggccgtccccagagggaacggatggatgaggccgtccccagagggaacggatggatgaggccgtccccagagggaacggatggatgaggccgtccccagagggaacggatggatgaggccgtccccagagggaacggatggatgaggccgtccccagagggaacggatggatgaggccgtccccagagggaatggatggatgaggccgtccccagagtgaatggatgagcacccagcctgagcccgggaaggtgctgagggttagcacaggccgcctgctgctgcaggagtgagaggggcccactcagggaaagaggggttcagggggagcagccaggtgtgtacagatggctgtagccatgtggaggcgcgcgtggggaccggcaggcaggcagggagttgggctttcttctgggagcagtagggagccacggttgaccgtggagcaggggagagacctggtttgatcttggtcttgacttccaagccccttggtccctccgaccttggaggctgctggaaggagagggcatctcatttaccatcctggctgcttcatggggatttgggagataaaaagcagctctttcagtttaactttggttgtaggagtcacagtgaattagttctttattttgttttttttttgaggtggagtttcactcttgtttcccaggctggagtgcaatggcacgatctcagctcaccacaacctctgcctcccgggttcaaactattctcctgcctcagcctcttgagtagctggggttacgggcatgcaccaccacgcctggcctattttgtatttttgatagagatggggtttctccatgttggtcaggctggtctcaaactcctgacctcaggtgatccgcccgcctcagcctccctaagtgctgggattacaggcgtgagccactatgcccggccaggattctttcttaaagaagagacggggtctcgctgtgttgctgaggctgatctcaaactcctgggctcaagtgatccttctgccttggcctcccaacgtgctgggattacaggcgtgagcca[136 bp omitted]accccatctctactaaaaatacaaaaattagccaggagtggtggcaggtgcctgtggtcccacctaatcgggaggctgaggtgggaggatcacttgagcccaggaggctgcagtgagctatgactgcatcactgcactccagcctgggcgacagagtaagaccctgtctcaaaaaaaggaaaaaaaacaacgtagactaaagaaccaaacctcagagttccccggctggtctgggtgggcctggctgttggatgaattctctttttccctctgacccttcagccccgctgggtgcgtgggcgcctgggaggctcaggctgctgcccggagggggcggctgctgactcagatctattgctgctgcttctgagcatccgcagacctatatctggccttagaggaaaacatacttcttcagtttcccagaagccatattggacagtgcaaaaacgtgccttttagaacatttctcaggctgggcacagtggctcatacccagaatcccagcacttcgagaggcagaggcgggaggatggcctgaggtcaggagttcaagaccagcttggccaacatggtgaaaccccgtctctgcaaaaaatttaaaaaaaaaattagccaggtgtggtggcacgtgccggtaatcccacctacttgggaggctggggcaggagaatcgtttgaacccgggaggcggaggttgcagtgagctgaggtcacaccactgtactccagcctgagcgacagagcgagactcggtctcaaaacaaaaacaaagtgtctcaggctgggcgtggtggttcatgcccagaatcccagcactctgggaggccgaggagggaggatcacttgagcccaggagtttgtacccagcctgggcaacatagcaagaccccatctctacaaaaaaaagttaaaactgggcatggtggtgtgtgcctggggtcccaactactccagaggctgaggcaggaggatcacttgagcctgagaggctgaggctgcag[132 bp omitted]aaccctcctggaggctcagtcaggccaaccctcctggaggctcagggctcggcagtccccaaacgctagacacttggattctttcttggatttccctgaattctgtggccaaagagagcgtctgaagggctgcagctgaccaggtgcctcccagctcctgcacccctcccacccctgccgtggcctcatccccaggtggggcctcatggactttggagcctcctgggagactggagggggcctggggggcaaaggttctcccagggggccctgcagacaggcggtttctttacagcctgggcctctgggcccaaggacaccgccctgggccccccgcagctgctgggacctggtgggagtgcccaggtggggcctgcctggggactgagtggggaaaccatagcccccctgtgaccttgggcactgcccacctgtgaccttgggcactgctgggggaggggccgcatgtgctggccccggccaccctcttctgtcctggccaaccctttccttggattttctgcaaacctctggggtctttttctgaccttcctcccacctcccagagccggtgggctggggaggggagtcctgagccggggctgaactccctggttctaggggtggtccgggcagccggggaaccccctccccactcccaggtggccctgggacttatcttgcaccctgtccgccagcagactccactgaccccctcggagctgtcgtttctctgggaggtggggtggagaaaatcatcaacgtttcgccacaaacaagaatttcctgtttgcccttccagggctggggggtggcggttatctcactttttcctcccctcccccaccggcgccaccacccgagccccgccaccctctctcctcacaggtgccccctccagaggggcccggtcctcatcaggtgggggcggcacctcccacccccccaggcctcccacacccccccccgtgcagagccgggggagtgtcagggtcgggggccacagcgtcttccctccatccccagagccacggagtgtgtcttgcagatccgtgtaacggggctcgggcgtgcaaccttctgggaagaaaaccaaagaggaatgaaggggtcagaggctgaggggggctgtggagggggctctgtcagaaggcgacgtttgggcgggaaggcaggagccgagcggggacccgggagctgcattccaggcagaaggaacagcgccgcggaggccctggggtgggggcctgtgcgttttacatagaaagacgccaaggctgggtctgggggctcctgcctgtaatcccagcgctgtgggaggctgaggcaggaggatcacttaaggccaggagtttgagaccagcctgagcaatatagcaagaccttgtctctatagaaatacaaaaattagccgagcgtggtggtgcctgcctgtggtctcattggctcaggagaccgaggtgggaggtggaggctgcagtgagctagggtctcaccactgcactccagcctgagtgacagagcgagaccctgtccctaaatagggcagctcaaggccggggcggagggagcaggagagggcagggaggggccaggagggtgctggggggccctgggaggctgtggccgagggagggtcatgctcagatgtctgtgaaaaaccccccaccccacccaactgctgagtggggaagggtctggcaggaggggcggccgggggacctggaggtggcttggctccacgcgctctgtgcctcggtttccccttctccgaagcaggtggtgctgggaaggggagacgatgggcccagccttggtaattaggggtccacaccttccatcccccacagcaggaagtggacagaggggaggggaccccctcagggaaagacccccaggcctgccctgtggccccgcattttcttggcatcgcactgagaaagcaagttcatttaacatgcatttattaggcaactgctgtgtgcccgattttggatgctggcaacaagataagaattccgcatgttccagggcagacagacgagagacaaatgcgtgaatccacacagctggggccatgcgagggctgggggtccaaggggggccgtgagccagaaaccccgtgaggccggtggtcggtaaaggtgggtgggagcagagcatctgcggaggtgatatcggtcctgggaggacggggggctcccctccagggagggaatgaccacaggggacccagacgaagggaaggggctgagaaggcctcgcagacgggaggaacagccggggcgaaggcggccgctcggggctgatggggggcggtgggggtctcagcggaggggcaccttcagaacttcacacccgacccctcccgtgatcagagcaggccccagggaggtcaggcggcgtggaggggagtgcgggccgcttatctcggccctcagcccctggggagggagtttccggagattttgcccaatctccagcctgggtttagggctcctgtgggtgtgtggtgggcggctgatttcagagctttctggttgacgtttcagaggggcagggtttcggccacagaacccaggtgagaaccaaggcctgggtttgccatggggtgtgctgtggcccagcagttcaacccgggatctggcccacaaggggggcctggacaccgccatgggcagcctggacaccgtcccctgctttcccatccctggggcctcggccagctggccagggcggggcgccccccacaggggagcggaaccgggggccagagacccataaagcccaggcggcctttactgctggctttgttgctggctgcccacagcaacggccattagagccgcctcccccgccagcagctggggcccccgcaggtcctccctttactgccacgcatcagtgccccggccccacaggggtctgaccgtgcctcgccaccggcccagttcgcccaccatttggcctgggagttaatggctcccctctccaaccccaaccttggctggctgtacatggggcagctgattgctgcctggcgcctcggtttccccatccgggatgtgagggtagctggggcgccaggtgcttggggtaaagctgctgtgttttctcacacactctatttgagagatggggaaactgaggcaggaggtgcggtgaggtttcttgtaggggctgtgccagggaagggggggtccaggcagggtagaccccgtaataccgggtcagaatctcagaggagaggaccttccgctcgccctggaagggcccaaggtgtgctggcctctacgtgcggttcttagccggggggctgcgtaacgaaggacctcaaaccgcgggcgtaaaacaaacgaaacctgttctccctccgtcctggagcccagagtccaaaatcgaggcgtccgcagggctgcgctccctccaggggctgcaggaggagccttccgcctctcccagctcctgggggctccaggagtcccttgacatgtggccggcctctgtctctgtgcgaccgtctccagtgcccaccggccttcactgtgactttttctcaatttgatcacgtctgcaaaggccctttttccaaataacgtctcgttctgaggttctgggccgatgtgaatttgggtgggggatggcgttcaccccaggacagccccagcggtgaagtcctccccattccagtacctgctgcctcaggcgtttccctggcaagctcgtcctgtccccctctccgccctgtccccctctccgccctgcccggctcacttttgcagctgagaaaatcaaggttcaagtaacgagcatttattaggcaactgctgtgtgctcggctgattccagactctgggaacaaaacagactaaaccccagatacactcctagatccgtgactcggtgatggacggggtctcggaggaagaacgtggaggggagggggcggcagccgggccggggtcagaggacgaggccgggcgtgtggccatgtgtgcgtgcctgtgctcatgggacccaccggcccggccagccgggtctacctgagggccccacacccctcaggcagctgaaggggaaagggcctccccggccaccataaatcagcgcaggaatgcaggctggccagtctggcgctggccgggttggggcggagacaaagaccaggcagctggacctcgggcagcctcgaccacccagggcagaggtcaggactcctggctgcccccccagccccttcccggaaggcctcactgggcctccaatacacagacggggaaactgaggcccagagaggggcaggacggctgcagggtgatggggcctttggccggcctccccagcacctgggatgtccccgcagcagcaggggctgggcgtgggtctccttctgggccctaatgaccgatcatcccagctgaggcctaattggtggtttcaaggctccccactgcccagccagccacattcccccgagcttaattggcagcctggtatttgtcgcagctcctcctcggcaaattggcccccgcctgaactccgctttctaattatccctgccggctttcccccaccctgcccgcccgaacctgtgggtgggggggggcgctgggggacctcctggctccttgtaccccagacggagcctctttcccctctggaagacgttccggggcctggtgatcttcttcctccccagccaccaccctggcaggcagaggcggtcggtggctcatttcatagctggaggctgagactccaggctccaggtgcggggaagccagcaggagacaggaggaccgggatgggaagcagggcggggctctgggccaagtccccagcagcccccaggctctggtcccgcactcgccgctgtgtctcagtttcctcacctgcaaagcagagccagttctcggaacaaatgcgctcccgtccgaccctcaggacagccccgggaggcatgctggtgaatttttgcagcgatttgctgtgtgaactcaggcaggcactgtcctagggtaaattgtgtcccccaaagaaaaggtggagggcggtggctcccgcctgtgaccccagcactttgagaaggcaacacgtgaggatcgagggagcccaggaggtcgagaccagccagggcaacatagaaagacccatctctacaaaagaaaatgtaaaaacttagccgggtgtgatggcgagtgcctgtggtcccagccacttgggcagctgaggcaggagaatcccttgagcccaggaggttgaggctgcagtgagctatgattgcgccactgcactccaggctgggcaacagagtgagaccctgtctccaaaaacaaacaaaaaaaagactttgggaggctgtggcaggcggatcacttgaggtcaggagttcaagaccagcctcgccaaatagtgaaaccctgtctctacccaaaaaatacaaaaattagctgggcatagtggcaggtgcctgtaatcccagctactcaggaggctgaggggggaga[132 bp omitted]gggcgcagtggctcatgcccataatcccagcactttaggagactgaggcagtcggatcacgaggtcaggagaccatcctggccaaatggtgaaactccgtctctactaaaaatacaaaaaaattagccgggcgtggtggcgggcgcctgtagtcccagctactccaagaggc[144 bp omitted]caggttcaagcactggattcccagtacctgtgacaggacctcatttggaaacgggggaacttactgacatacaatcacgtgttgacactttggtcaacctc[184 bp omitted]gtggcgggcgcctgtagtcccagctactcgggaggctgaggcaggagaatggagtgaacccgggaggcggaggttgcggtgagccgagattgcacccctgcactccagcctggggacagcgagactccgtctcaaaaaaaaaaaaattccatatttcttgtgcaccttttctgtgttcagctgtgttagacgcacagacactcatgctcacgttgccactgcctacgggacccaggacagccacagatttgtagcccaggagcgctggctgggctgtgcctgtgcctgggtgtgtgggaggctccacccgtgaggtgtgtgtgactcactgtttgatgttcacactgacgaaatcaccaacagacatttatcaggacgcatcctgcacgaagacagaggcagaggctggagcgacgcggccacaagcccaggaacctggagcccccagaagccgtgagaggcaggaaggttcctcccttggagacttcggagggaacgcaaccctgcagacatcttttgttttgttttgtttttagagacagggttgcgttctgtcgcccaggctggagtgcagtggtgcggtctcggctcacttcagcctccactgcccaggctcaagcaatcctcccacctcagcctcccgagtagccgggactgtaggcatgagccaccccacctgggtaactttttgttatcataatgtagagatggggtctcactatgttgcccaggctggtcttgaattcccgggctcaagcgattcacccgcctcccaaggtgctgggattacaggtgtgagccgccaccctgaagagaagttggttttggacttctgggctccgggaccgcgggagaatagatttctgttgctttaagctgcaacgtgtggctgtaagggagttaaggatcgatttgagatgaggtggccctaaaaccagcaggctggtgtcctgagaagaggagagagagacggggagacggtcttgtggagacggaggcagagactggagcgctgcggccacaagccaggacgcaccttgatctggggttcccgggcccctggaccgggagaggacactgtcttgtcccaggccacctggtttctggtgcctccttgcagaccctctgggaagctcgttcaccggcatttctgtcttgcagccttgtggttcttcacctgcccagcggggtcttcggctctggcagcggcttgagggtcctaggggtggtgacccctgctcctgtcctcctgacctggcctccagtgcaggagggacatggttcccacacctgagctctggcaccaactaacccatcccctctccaccctcacagctctacgaactcgacggggaccccaagaggaaggaattcctggatgacttgttcagcttcatgcagaagcgaggtgagccctctgcccccaccccgctggagggaggtcacagaaacagggctgtaggaggggccctactggctccaggtatgtcggggcggtggtgagcaccccgtggctggaggcatccaaggctcctaaatcgggagggacttcaggggtgtcttggggggaaacacatcctgccatggaggtttgacgcgggaggcacgcctgtgagtctaaggggtaggtcccttggtggggggcagggcagtctcagggccccaacccagaacagacagtccaggtcatctccttagcatccagggtgcagtgaagtgggggtccccactactgggtaatgggggagtggaaccagcctctgtgtttagggagtggggtcagattcgggctggccaggtgggtgcaggtgcggcaggacagaagccccccgcccggccgcgagatggcttagagtctaatgatctcatggcggccaatgcgacatttgagtcctggcccctcccctcttcccaccagggcctcagtttccccatctgtaaaaacgggccacaaacagtccctgcccaaaactcagtggccagcaggtaccccagatgtgctgagtgcagggccgctgtttactgtgcacacttattgggcaccaacggtataccaggctctgtgcccccaaagtctcctggcctagagagggcaggtctgggctggtgtccaggtggggaaactgaggtccagacacaagacagactcagacgaccaagggtagccggggtgtcccagcggccattcccaggccccaccccagcttagagtgaccacggggcagagagagtgcggcaagggcttccgtctcgcctccaagtcctcgtcggccggagagggtcctaggagcgtctgctgccaggtaggagccgccccaacccccctggacactcctctagggcagggagctagctccgatccccactgttcagacgggggaggaggccttggggcccacagaggtcggaaggggtggggcagagggctctgtccctgcacttggggccgtcacaggggcccgctgtgtcccagcctccgcccacccctcccctggcttctataaacacaggccccagacccgccactgccagccgcccggaagggaaggaggaggagggttgtgggccccctggcccacactgcccagcggcctccgagttaacccctcccgtgctgggaacagaggatccagacccgggacctgggcgggggcccctcctgtgttatcctccaaggccaggcttgaccagggcccactgccccctgtgaggctggacagatcctccccatgaccctttatcatcctgttcgcacctgctcagccctgaccactctgctgtggggctccgagctcctgggtccaaagccaacccgttttgctgttacccgtgcctggtacagtgcctggtg[132 bp omitted]gaaaccccgtctctactaaaagtacaaaaattgaccaggcgtggtggcaggcgcctgtaatcccagctacttgggaggctgaggcaggagaattgcttgaatccaggaggcagaggttgcagtgagccgagattgcagcactgcactctagcctgggtgacagagggagcccccgtctcaaacaaacaaaaagcaggcatggtaggctgctcatgagtgtgggtgagatgggggcccgtggcacgtggggccgtgagggttggtgtccagctttacctccctctccaagctgggaattcctacaggacaggagacagcgagctcctatgcgtccctcaaaacccagcctcaaagctccctcttccttggcttcctccaggagcttcctgctctgtaatgggggcccttggagctgagaatccgtcaggtgaacctgcccatcaccctagacttcacaatcttcctctccttcactccagacagagagaaataattttttttttcccctgtgtcacaaagtaaaaaactctaactaaatttctcagaattctctgggggctagaagtgagggaggggtcctgaccacaccctctcccctcagcagcagcagctggaccacctgacctgctgttccctgacaacctccccacccttccttatctgggccccacgacgggccctggtgatgctcccagctccttctgtaaacatcctcctcccgcccactgcagagccagggcgtggccctgggaaccaaccctctgctgctgatccttttttttttttttttttgagacagagttttgcttttgttgctgaggctggagtgcaatggcggggtctcggctctctgcaacctccacctcccaggttcaagtgattcccctgcctcagcctcctgagtagctgggattacaggcgcccgccaccacgcccggctaatttttgtatttttagtagagacagggtttctccctattggccaggctggtctcgaactcctgaccttgggtgatccgcccgcctcagcctcccaaagtgctggaatgacaggcttgagccaccgcgcccggcctgatgccgttacttttactttgcaaactctgaggcctaaactggtgtcccgagtggggccgggcggaggctctgggcaggtttccgggccgatcctgcagctgaaacccggcgcggctcctctcgcccaggctgtaaagtgggtttcaggtgggatcgggtctgaggcccgtcttcctccaacctgggatctcctccattcactgggggttttgcaacctgggaagggcctggaagtggcggagggtggtgggaggtgtttctggaaggtcagacaccgggggttccgggggtagcaggcctcgaccaggcagagggccggctgctcactcagggctgcacccgctctccagccagtcacatcccagaacctcgatgtccacgtccccatccctaacagggcgatgggcgtcccctcccaccccatggtgagtgggcagcagctatggcctgggccacctgccctcactggtcttcactgagcgcctactgtatgccactgagtgctgggaccccacgtaggcagaacatggggtgggggccacagactgtacacaattgatctcctaagtgcagaatttcacggacagaacgataggtttaagtgggtcttgcctactgtcaggccagggaggggctgggcagaggtggagctgacatctgaagccagaggctcctggtgcaggggcagcctgggagagccctggagggggcaggtagggctggaagggcggggaggggccacgtctgcagccggctccaggagttgaggggcaggaacctgagtcagcccagccgcctcttcttcctgggccagcccacctaccgcccttcccctgcctaggctaatcctccccctttccctccctggcatagcgtagcccacaaccctctcctcctgggctagcccaaccccccatgtcggggctagcccatccccttcccctccctaggccagtccacagccctccattctccagacttgaaattgggtaagccaggctttaccccttgcctgcctgaggctgcagagcccctgtcagtgtggagggaacaggcctctgggaacataggcagagttgttttggcagctgccgtggtgtgtggcgtggagaaggaataacaaagatccgggcgtctcccgcacgtccctcctctcagtaaccctcctcccgagggctgcgctgtccctaagcccaggttactggtggataaaccgaggcagagctgccccctctgcaccctctcgagcagaggttcccagcctggatgatcctgcacccacagagggccctgggcaatgtctggagacatctgtggttgtcacagcctgggcgggggagtgctcctggcatggagagggcggaggccaggacactcggctccctgcagtgcccaggtggcccccaacctccctctcgccccttcccccagggacacctgtgaaccgcatccccatcatggccaaacaggtccttgacctgttcatgctgtacgtgctggtgacggagaagggcggcctcgtggaggtcatcaacaagaagctgtggcgtgagatcaccaagggcctcaacctgcccacgtccatcaccagtgcagccttcaccctgcggacccagtgagtggcggacggttgtgccgaggtcgggccagggcactctgagcagccagtgcaaggggcctgcagaagagggagggggtggtgggcagctgcagaggagggggcagtgggcagccgcaaagggcacagggccacaccgtgcgtccagggcccgagagcgtcaagtaggggtgcgaggaccacacagtctctggggttgtgcaatcaggggccattgcgaggaacagcattgagatggagggaatgggcaaaggcccagcagctctgggggctgctgagcaagtccaagggaagaaccagggatggtggtgccacagtggggtttactttgtactgaaggccaaagagagccgtaggggtgacccgggtgccatcctcttccctcgtcccacccacagatacatgaagtacctgtacccctacgagtgtgagaagcggggcctcagtaaccccaatgagctccaggcagccatagacagcaaccgacgggagggccggcgccagagctttggtggctccctctttgcctactcgccaggcggggcacacggcatgctctcctcacccaagctacccgtgtcctccctgggcctggccgcaagcaccaatggcagctccatcacccccgcccctaagatcaagaaaggtaagggcctgtatggggcctggggcgtgttcccaactgagcttcagcctggctgtctgaccttgggggatacctcttcccctctctgggtaaccaggatgaaaaaccctatagttggcatggaaaagggcttccaatctaccagtcctctgcctatggcagacattaccaatccatcaccattttctaattccacacaggtggcaggcagacattgctaatcaatctgtgtttccagtcctgtggccaaggcagacattactaattgatcactgtttttccagtctacactgaggcaggcatcatcagttgatcagttttccctcccactgagcctctgaatcctccataacacagaggtaccaacagcacacacagcagtgtcacctcagtttgcctgtctgagttaccatttctcatctgggcaacatagtgagaccccatctcaaaaaaaaaaaaaaaaattagctgggcgtggcaacgtgcacctgtggtcccagctacccaggaagctgaggtggtcagatgggttgagcccaggaggtcgaggctgtggtgaactgagattacaccactgcactacagcctgagcaacagtagtgagacccagtctaaaaaaaatttttttaggccaggcacagtggctcacgcctgtagtcccagcactttgggaggctgaggcaggcggatcgcttgaggtcagaagtttgagaccagcctaatcaatatggtgaaaccctgtctctactaaaaatacaaaaattagccgggtgtggtggcacacacctgtagtcccagctacttgggaggctgaggcaggagaatcgcttgaacccaggtggcagaggttgcggtgagccaagatcacgtcactgcattccagcctcagcgacagagtgagactccgtgtcaaaaaaaaaaaaaaaaaaaattagcttagtgtggtggtgggcgcctgtaatcccagctactcaggagactgaggcagaagaatcacctgagcctgagaggcagaggttgcagtgagctgggatcgcgccactgccctccagcct[148 bp omitted]accccgtctctactaaaaatacaaaattagccaggcgtggtggcgggtgcctgtttcccagctactagggaggctaaggcaggagaatcacttgaacccgggaggcagaggttgcggtgagctgagatcgcaccattgcactccagcctgggcaacaagagtgaaactccgtctcaaaaaaaaaaaaaaaaagaaaagaaaagaaaaaagaaggtgcatgttcctgccttgagtggaaggcagggcccagcccctcctggccaccaattccccttttttcctacctagaggaggactcagccatccccatcacagtccctggccgcctgcctgtgtccctggcgggccaccctgtggtggcagcccaggcagcagctgtgcaagcagcagccgcccaagcagctgtggccgcacaggcagctgccctggaacagctgcgggagaagctggagtctgcagagcctccggagaagaagatggccctggtggccgatgagcagcaacggctgatgcaacgtgcactccagcagaacttcctggccatggcggcccagctgcccatgagcattcggatcaacagccaaggtactgccctcgtgcccagacccgctgtgcttcctgcgtgtgtcacacagtgagggccttggagcctacatatgtaaagagtgccaacaaatcaataagaaaaaaaaagccgggtgcagtggctgacatctgtaatcccagcactttgggagaccgaggtgggtggatcacttgaggtcaggagttcgagatcagcctgggcaacatggtgaaactccatctctactaaaaatacaacaaattagccgggcgtggcagcgcacccctgtagtcccagctacttgggaggctgaggcaggagaatcacatgaactgggagatggaggttgcagtgacccgagataacgccactgcactccagcctgggcaacaatagcaaaactccatctcaaaaaataaaaaataataaagtaaactggctgggcaccgtggctcatgcctataatcccagcactttgggaggctgaaatgggaggattgcttgagcccaggaatttgagatcagcctgagcaacacagtgagatgccatctctacaaaagttagctgggcgtggtgacacgctcctgtagccccagctactcgggaggctgagatgggaggatcacttgagcccaggaagtcgaggctgcagtgagccatgattgcaccactgcattccagcctgggtgacagagcaagacctggtctcaaaaacaaggtaaaaaaaaacaaagtggagtatggacaaatacacttattcaacaaataaatattgagcacctactgtgtgcactggtgacagcatgaatgtgacagacaccgtctacaccttgtaaagctaaaatctagttggcgagacagacagaaaacagaacatgtc[216 bp omitted]gaggcaggagaattgcttgaaccctggaggtggaggttgcagtgagccgagatcgcaccactgcactccagcctgggtgacagagtgagactccgtctcaaaaaaaaa[146 bp omitted]aatacaaaaaattagccaggcgtggtggcgggcgcctgtagtcccagctactgggaggctgaggcaggagaatggcgtgaacccaggaggcagagcttgcagtgagctgagatcgcgccactgcactccagcctgggcaacagagcaagactctgtctcaaaaaaaaaaagaaaaaaagaaactaatttgttcttcttcccacagcctccgaaagccgccaggactctgctgtgaacctgacgggcaccaacggcagcaacagcatcagcatgtcggtggagatcaacggcatcatgtacacaggtaggacccctgaggccacgccctgcctggacctcgcctctcccgccgccgtgaactcaggaccctgagttgcgcctggtcccacctgcttgaacctaggtgtgcgggcgagcagggcacggccaggggctttgcaggacaaacagtcaagactgatggagaggataccatcgttcacccggtaccacgctcagcccagagggggtcgtccacagatacatattcagtgtgacgttggatggttcacattcctagttttttgttttaatgagacggagtcttgcacagacatgcaccagcacacctggttaatttttaaattttttgttgctctttaaattttaaattgctttgtt[139 bp omitted]caggggttagagactttcaggctgcagcaagctgtgatgacgccactgcactccagcctgggccacagaccgagaccctgtctcttgaaaaaaaatttaatgaatgtattttttattttttttaatttgtaatttgtaatttttgtgggtacatagtaggtatatatatttatgggttttatgagatgttttatactggcatccaatgcctaataatcacatcagggtaaatgaggtatccaaaaaattgaatctaggctgggtgcagtggctcatggctatagttccagcacttcgggaggttaacacgggaggatcacttgagcccaggagttcaagaccagtctgggcaacatagtgagaccccatctctcctaaaaatataaaaatcagcagggcgtggtggcaggcgcccatagtcccagctactcgggaggctgagtagggaggatcacttgagcccaggaggtggaggttgcagtgagtcaagatcacaccattgcactccagcctgggtgaaagagtgagatcccgtccttctctctctctatatatctatatatagatatatcgatagatatagctgtagctatacatagatatatatagattagatatagatttatatgtatctataaatacatatatacttttatatctatatctacatagatatatatatatatagttgttttttttttcttttgagagggagtcttccctctgtcacccaggctggagtgcagtggcacgatcttgactcactgcaacctgtgcctcctgggttcgagcgattctcctgcctcagcctccccaagtagctgggactacaggcgtgtgtcaccacacccagctaatttttttttgtatttttagtagagatgaggtttc[133 bp omitted]attaaaaagttgccgggcacagtaggtcacacctgtaatcccagcagtttgggaggctgatgtgggtgggtcacaaggtcaggagttcaagaccagcctgatcaacatggtgaaaccccatcttccctaaaaatacaagaattagcgaggtgtgctggtgtgtgcctataatcccagctgcttaggaggctgaggcaggagaattgcttgaacccgggaggcgaaggttgcagtgagccgagatcgcgccaccgcactccagcctgtgcaatggagcaagacttcgtctcagaggaagaaaaaaaaaagaattaaaaaatttaattaaaaaagtggagtcagtgccaggggcagtggcccacgcctgtaatcccaacactttgggaggctaaggagagaggtttgcttgaggccagcctgggcaacac[138 bp omitted]ctccgcctcctgagtagctgggattacaggtgcatgccaccaggcccggctaatttttgtatttttagatgatacggggtttcaccatgttggtcaggctggtctcgaactcctgacttcgtgatctgctggtcttggcctcccaaagtgctgggattacaggcattagccaccacacccggcggtaaatgaatagtttttcttaaagtggagtcaggccgatggttcatagtggccaccaggtggcgctgtcgacacagagcagccttgttgcaggcccccgcccggctgtggtcagaggctgagctgaaggtcagtggtgtcctcacaggtccacaaatggatttttgaggggtccgtgccctccggaaatcagatgtaaaacgtgtacattcatattgaatcttacaggggagaaggccaactgtgtgctaggggtctcgcaaccccacatcaacgaaccatgggcatcagggttctccctgcaagagctgtgtgcacgctgatgtgcatgtgtggattaaacacacgtgtgtgctcacgtgcatccatatatatgcacatgtgtgtgatgaaggagtgagcagacacagtggggaagtttaagctgggctcacgtctgtaatcccagcactttgggagtcagaggcaggaggattgttttaggccaggaacttgagaccagcctgggcaacatattgagagcccatctctacaaaaaataaaaaattgctaaaatattgccagccacagtggctcatgcctgtcatcccagcactctgggaggccaaggtgggtggatcacctgaggtcaggagttggagaccagcctggccaacatggtgaaactccgtctgtactaaaaataaaaaattggctggtgtagtggcaggcgcctgtagttagtcccagctactcaggagggtgagacaggaaaactgcttgaacccaggaggtggaggttgcagtgagccaatatcgcaccactgcactccagcctgcgcgacagagcgagacaccatctcaaaaaaaaacaaaaaaataaaaaattagccagacatggtggcacgcccctgtggtctcagctactcgggaggctgagctgggaggatcacttgagcccatgaggttgaggctgcagtgagctctgatgccaccactgcactctagcctgggggacagagtgagagagaagtttattccccggagcaccccattgggtctcccttgtggcccgcctcgcatcttcttaaactctgcatggcatatgtcttctgttcttgccttaggagttctgtttgctcagccgccggcccccacgccaacctctgctcccaacaaaggaggcggcggcggcggcggcagcagcagcaacgcaggcggccggggaggaaacaccggaaccagcggcggccaggctgggccagcggggctgtccacaccctccacatctacctcaaataactcgttgccttaaccgcatcactccccacccgccacccaccctggagcccgccggcctgggcagggggtccaggtgggccacacaggggccaggatggcggaagatacgggtggggagggaagatatccagaaaggagccacagctgacgccaaaaagaaaagaaaaaagatatatatatatatatatatatatacacgtatatatataaagagaatttaataaaacaggggaaaaccaaggaacacttgaatttctcaggttttggacattcagagagatgaattgtgagaacagcaaagaaatccatcagaaaaacagaaagaggcagacgtttcccagggcgttcaggcagccctgatggaccgaaggctctggtgtctggtttggccccacagcagtgtgggccgatcctgtttacctcatacatccctgcactgtgtgttttcatttttgtctgctttagttctcttttattttctattcaccacacactcaccactcccagcttctcgtgtccagtgaaacccctgaaccaagatcactgaatttttgtttttttcttgttgctttgggaaatttttttttctctgtagggtttttaagaggtttcgggggttttgttgtgtaaatattctattttattcttggggggatcaaaccttaggaaaaggatatctatatatctatatagctatatatttgtgttccttcagggaaactggtcttgaaaaagcaagaaaaaaaagcaaaaaaaaaaaaaaaaaaaaaaaaaaaaaactcacctttttatttttcccatgaccaatttgggtccctttgtccatttctgggggtgcgttgggcagctgtgagcccagcacatcggatccctggggctagagccgcggagccaatgaactcaggtgctatgggccgggctggggcagagggtgcatgctggggtcccaccggccaggggcccctgacagtgaattgctgactgtgatattccacgatgcttttgcttgtgccgtgcttgtctgctgggctctcgagtcaggggcctggaaatttttttttttttttttttttgagacggagttttgctcttgtcgcccaggctggagtgagtgcaatggtgcgatcttggctcactgcaacctgcacctcccaggtgcaagcgattctcctgcctcagcctccggagtagctgggattacaggcgcccgccaccacgcccagttaatttttgtatttttagtagagatgggggttttgccatgttggtcaggctgatctcgaactcctgacctcaggtgatctgcccgccttggcctcccaaagtgctgggattacaggcatgagccgccacgctggcccggtctggaaatcttatctaaaaagtagcaagtgctggaaaaagggcctggggggcgggggtggttcttgtcgaagcccccaggctcctgtctcagggatgaatgtggcgtctcattgggattcttctcttgcccgaaagggctgcttttgaggactatcaatactggggagtgggggtgaagccggacctcactcagggtgaggatttcagggccccggcatcctgaacaccccccacaccccaacattctcctcgctctgtcccttcctcttctcccaaccccttttgtgctggggctgcgagctccccgagttctgcggtgactaaatcgaggccgagaagggaggctgccccccaccaccctgtgggtcagtacccctccccctggcttggagaaagtggggtcaccgcagctgagctggggggttattttggctggagctgctggagcagaaaggctgggtctgaaatgcccagcagggtctggggacttcgttggacccgcgtggtgttgggcggggctgtcgtgtcctacacgggagctctgggctttcatttctcttggggtgcagtggggattaactcagctattcccagggtaagcctgggtctctaattgggccctgggagccctgttaggccaccggcatgggggcttggtgaggaaggggactccccagctccccccactcccaaccacctccccattgccttggagacccctggggagggggctggggggcttctgagcccctgagtctaggttcactttcccgtcgggctgtgggaggggactgtcactttcctgtgtctttggggaggggacccccacttccttctcggatctcagggccgtggacacacaccccctttccaggagggggtggtgggcgtctaggttttccttgtcccttcctggggccagcaccgtagcagcacaatcaccccgggaagggggtgtctgtttgcctccagacacaatcgggccccactcgcagaaccacctggactctgtccgtgtctgtcccccggcctccagggctcctctcccgggacccccgtcccacgcctgggccccgcgccgggggaagcgcctgctgcctatctctgtctacctcaggtctgacttttgatgccaaaatctgagcccctggggtgcctctcccccgcctcccgtgcaccagggtctgcagcagccactggggcctggctgcctgctgcatctggcggccctggacccctggggcccccgtgcacctgcccacctcggagcctggggaggggccgtgcagggtcgagggctgggtcgtctccctcgggctgcgtgtgtgtgtcgggaatcctgcgtgtcgtgtctgtgggcgatccggcctcccggcggtgggtggacctggattctaactcagaggacttgagcctgctgttaactccgatgattgtagggacaggcggggtgggtggggggtgggcgcgaggctgggtcccggcccaggagaaggaagtcgctgaaggcagtggccatgctggccgtggaaatgggaggcggttgcagagggtctatggggcccggtcctggatactcggcaggaagccgtgtctgcagaggctcctccctgcctcaggtggccccgttcaaccccagccgtgcccatctcctgccaccgcctgtcggtgggggtttaaattcggtgtggctttctggggtgcagctcagcacccccccttatgcagactgggagggggtcgggcagtcccctcagccacgaggaccctggatgggttctagttcacttgggaccgtggggcctggctgcgtactgagtgggtgccccacagtcaaggccaacgggggctccccctgctctgagatgttgggagaaaggcggcttctggaaccttccgtgggacccgtaagtggctgtccagaaaggcgggagggtgggcacggggcacggggggcagctggggtcgttgttaagggtcacgcatctgtacagttgaatttcctttctcttatcatgttttacccaccttgtcccttttttccccaattgtgcttttgcatttttttccttggcaaatgtaaactcagcctttcattcatgacgtgtgaaatttcagtttctctggagtttgtcagacggcgtgggaaccacgcctgaaactcaggtaataggaggaaaaaaaaaaaaacttaaaaaaatttttaaaaaacataaaactactctctacctctggctgggcccagcctgtctcgccctggccgcggcagggtggcctgtaacaatttcagttttcgcagaacattcaggtattaaaaggaaaaaaaaaaaaaaagacaaaaagaccaaaaaaaaaaaaaagtgtgattttgaaatttaaaagaacactgaaagtttacattttatagtaacattattatgcagattgtatttaaacttcagaaatatttaagacgattgtaaccctgtaaagctgatgagatattaaaacgagacaaaacacttctgacttttaacagaaaagtgtcctgtggtgttttttttcttttggcgtctccccaacctccagctccaccctacacccctgcccagcacagccaggggtgagtggaagggggtgctctatccccctctgccctgcatcgctctaggtctggttccgggcggcagagacagctacaaaagcgggggtctggccaggtgcggtggctcacgcctgttatcccagcactttgggaggtctaggagggcggaatcacctgagttcgggagtttgagaccagcctgaccaacatggtgaaaccccatctctactaaaaatacaaaattatccgggcgtggtggcgcgtgcctgtaatcccagctactccggaggctgaggcaggagaattacttgaacccaggaggcggaggttgcagtgagccgagattgcgccactgcactccagcctcggcgacaagagggaaactccatcaaaaaaaaaaaaaaaaaaaaaagcaggggtcctcagccagggtctgtgcccccagggggaccctggtccatgtctgggggcatttgtggttgtcacgcctgggggggcgctcctggtgtggagtgggtggagtcctgggatgctgctcggcaccctgagtgcccaggacggccccaccgcagagaacaatctggcgcccagcatccacactgcaggagttgggaaattctgccttcattatttaaggtggggtaaaaacagttctccctgcccacagcagacaccaggataagctcctgacagggcagacggtgtaaacccgggggaacccagctcctgggactcgcctcctctctccctccctactcagggcatggatttcagtgtgtgcagcctcctgggaccccagcagggccgaggatcatgggatgcagagtctgtagggggtccatggaatcccctaacccagagggccttaaccagggtgattccgcccccaggggaccctggtccatgtctggggacatctgtggttgtcccatctggggggagctcctgacatggagtgggtgaagtccagggacgctgctcggcaccctgagtgcccaggacgtccccaccccagagaaggatccaaccgcaaggtccacagggccgaggggagctcctggaggccgctctgggcacctctgtgcctcgctgagagcccgacaccaatcccgttttagggatttgggatgacaggtgtggcagggccagtgtgcgcacccccagccacctgcccacgagcctgacccctcgcctcctgcctcaacagggctctgcatgcgggcgcccctggcgttatccgaccggagctcccagggcaagtggcccggtccggcctcagggccttcacacagctgttccaccgccgggaacagccctctccccctttgctctgacagactcctttccatcctctgcagccgacacacagtccccgcctgcccatgacaggagggtgcggcccctcgggtgggaggcacggggctccccgctcctccgccctctgtgcggcccagatggaggcccttgtgccgagcgggacaccctgttcccgagccccccataagtttgccctccttcacctcctaggcgagcccaggaaccagcccactggtgaagccgcctggagctgaggcctctggggttcaggggcgtcctggtggctgggggagggaacttttccagtgctggccacattttcaccttttcccttacaacaccattcgggtcctaggaaacaagaccaagggccagatttggcccctggacagccagtttgcagcccccaaacccagaacatagtaaagggactcagctggggtcagaggttcacacccgtaatcccaacactcggaggctggagcgggaggatggatagagcccaggagtttgagaccagcctgggcaacatagggagaccccatttctaccagaaattaaaaaaaaaaaaaaaagccgggcatggtggctgcggtgaacagtgatcatgccattgtactccagcctgggcaacagcaagaccctgtctctctctctctcttttttttttttgagacgaagtctcgctctttctcccaggctggggtgcagtggtgcattctcggctcactccaacctctgcctcccaggttcaagcaattctcctgcctcagcctcccgagtagctgggagtataggcgcccgccaccacacccggctaatttttgtatttttagtagagatggggttccaccatgttggccaggatggcctcgatatcctgacctcgtgatttgcctgccttggcctcctaaagtgctgggattacaggcatgagccactgtgcctggccccttttttttttttttttgaatcagggtctcactgtgtcaaccaggctggagtgcaatggcacaatcttggctcattacaacctctgcctcctgggttcaagcgattctcccaactcaacctcccaggtagctgggattacaggcacgcggcaccacgcctggctaatttttgtgcttttagtagcaacgggttgggttttcaccatgttggccaggctggtctcgaactcctgacctcaaatgataacacccaccttggccacacagggccagccgggaccctgtctcttaaaaataataataaaaggccgggcacggtggcttacgcctgtaatcctagcactttgggaggccaaggtgggtggattgcctgagctcgggagttcgagaccggtctgggcaacatggcaaaaccctgtctctactaaaataaaaaaaattagctgggcgtggtggtgtgcacctgtagtcccagcttcttgggaggctgaggcaggagaattgctagaatctgggaggcagaggttgcagtgagctgagatcaacccactgcactccagcctgggtgacagagcaagactccatctct[192 bp omitted]aggctgaggcaggggaatggcatgaacccagaggcggagcttgcagtgagtcgagatcacgccactgcactccagcctgggtgatagagcgagactccgtctctaaaaacattaactaattaattaattaaaaattaaaaaataaaaggcctctcgttcttagcccacaaacccaaagaaagtggtattgcaacgttttcccaggaaagggtttcctgggccgcctaacccactgtccaccctcccattgcccacgcccaggggacgtgactggaggagggtcagcgtggctggaggtggacaggcccagactcagctgcccggcctcccgcgcaccatcctggccgaggctggccgggacacgtccctccccagggctgtgttggaggcgagggaccaacaacacccccacacctgtcccagccggttggttcctgaaacccacgttagaccctggccccggaagggaaaatggcattttccattccagccagaaatgagtctgccaaaccctgcgtcccggagatggagtcccactcactgcctggaggagcccgccggccccagggagaggagggaagaaccctgggaaagcccccaccccaaactggatcgtcaggccctgcttgttcacccgcagctgagggcctcagaggcggggagtcagggagggggtgcacctctgagttccccagcctgggagggagggactcagcccccagctctccccagccagggagggactcagccccccacctcctccccaggcccccacctctccccagccagggagggactcagccccccacctcctccccaggcccccacctccctccccagccaaggagggactcagccccccacctcctccccaggcccccacctccctccccagccaaggagggactcagccccccacctcctccccaggcccccacctccctccccagccaaggagggactcagccccccacctcctccccaggcccccacctccctccccagccagggatggactcagcccctcacctcctccccagcccaggaagggcccagccaccccctagcctctcagagcccagccacctccctgggccgcctgctaggtgcttgctaggagggcgggaggctcccggaggtgaagctcaaaccctcctctgatagccgattttcggagccagccaagagtccagactggagaggcggcggctgagacgcttccaaaagcagagggctaccagagccggctgctgctctccccactggcataggtaatgatggggctgccgcgggacggccgcagctgctgggtctgtggggccaggaccggggcagccaagccgactggggtctggctgggttcatcagtgcctgcaaactggcggtgctccataaatgtgcaggggatggagaatgagggccttacaccccgaggggaacgttcctgcctctgtgcctcagtttccccttcctggttacccccccttcacaacctccagctggcaccaacgagatccggccgctgggtggtctggagatgcccccaaagtgtggcttctgtcccctgctccaacacgattagtctgtcctcattccaggaaccaggctgggggcggggtgacctctgacctcacactgcagcctggcctggccacgtccccagggaggggaggaggggaggaaggcctggctcgggctgggccgcagcaggaggcctgtgagaaggtggagactgtagtccatcgacttcctgctgcccctgccctctcctgcctgtggcagcagcccacacctgcccggtctgctgggtgtcctggaacccgggaatttaaaaacttccaggctgggccaggcggtggctcatgcctgtaatcccagcaccctgggaggtcgaggaaggaggatggtttcaacccaggagttcaagaccagcctgggcaacacggcgagagcccctatctatgaaaaattaaaacgctagtcaggtgtggtggtgtgcacctgtggtcccgggaggctaaggtgggaggatcgcttgagccctggaggttgaggctgcagtgagctatgacggtaccactgcactccagcctg[219 bp omitted]gggtgaggcaggagaatcgctggaaaccagaaggcggaggttgcagtgagctgattgtgccattgcactccagcctgggcaacaagagcaagactcaattt[132 bp omitted]catggtgaaaccccgtctctactaaaactacaaaaattagccgggcgtggtggtgaacacctgcaatgccagctattcaggaggctgaggcaggaaaaccacttgaagccaggaggcggaggtcgaagtgagctgagatcacgccactgcactccagcctgggcaacagagtgagatccacctctcctgcttgtctacaaaaaacaaaaataaataaagtaaaaattaaaacaaggccaggcacagtggctcatgtctgtaatcccaacccttcgggaggccaaggtgggagcatcatttgagcccgggagtttaagaccagctgggcaataaagcaagaccctgtcgctgcaaaaaaagaaaaaaaaaaagcacaaaattagttgagtgtggttcctatggttccagctactcgggaagctgaggtgggaggatggcttgagcccaggaattggagactacagtgagccatgattgcacgattctcctgcctcagcctcccgagtagctgggattacaggcatgcaccactgtgcccagctaatttttgtatttttagtagagacgggtttcaccttgttatccaggatgatcttgatctcgtgatccacccacctcggtctcccaaagtgctgggattacaggccggagccaccacgccccgccgatttttttaaataatgttttttaaataatgttggaggccggcctcagtagctgacgcctgtaatcccagcactttgagaggccgagacgggcagatcacctgaggtcaggagttcgagaccagcctggccaacgtggtgaaactccgtctctactaaaaatacaaaacttagctgggcgtggcggctcacacctgtaatcccagctactcgggaggctgagacaggagaatcgcttgaacccgggaggcagaggtagcagtgagccgagatcgcaccattgcactccaacctgggccacagagcaagactgtcgcaaaataaagaaagaaaataaaaatgaggttggaggaaactctggaggcacagcaggtccttggattggactccctccctccctcccaggataaaatgaaatccaggcctcgttcacacggccctgcacggcccggccccgctccgtggtcctgccccagggccttcgcacgggcctgccccgcacacggttctctgggggtcgctggctccccgctcaaacggcccctcctgccgaccaggcgggtccccggggccgccctccctctggcctgggctcggggtcggtggctcgcgcctgccacctggcggccagcggggctgcggcgccgcacgctctggcaccagcctcctgccccggccgtgccctccgccgggagccgcggaccaggagtcgcaccgcctccggggaccgcaccccgcatgcagcctccagcccctgcctcttgctgctcgagggcacacgacccaggtcagctgcaacccccgggcggaaatcccgacttttaaatgaatgctccctttttatccctttttaaggggttggcaactaattgcacattttaaatcatactgtttttaggccggacgttgtggctgaagcctgtaatcccagcggtttaagaggccaaggcctaagcccaggtgttggagaccagcctgagcaacacagtgagaccccccatctctactagatatatatttagtataaataaataatagatatatgtttttctttgagacagagtctcattcgcccaggctggagtgcctgggatctcggctcactgagacctccgcctcccgggttcaagcgattctcctgcctcagcctcccaccacgcccggctttttgtactttttgtaaagacggggtttcg[132 bp omitted]atggtccgtgacgggcagccgtgacatgaagttagaccctgcttggctcggacagaactggcgacttgtttgacctacaccaagctatccgactaataatttagatgttgaggcccctaaagag[134 bp omitted]ggcaggacagtgagaccctggctctacaaaactaaataaataaggaagcagtgaattccaatgtattcatcgccaactagccatgttgctgggtgtgcgctctctcttttaggcgcaatgtgtcatttaggcctgtgacgtcggaactttattatttgaacatttaaaaataaatgaatccaagagcttgagtcacttggccaaaaatgcccaggaggaaaaggccaagtcaggtaccccggctctagagctactaactgatcgccggagaccctgggccttggaagaagtcgcctccccagatctctaagcaggccgcgcgaccctcgagtctcaggtaagcgggaaatcccacttcacaagaaagcccctctctccgaggcacgggcgcatgcgcgggtcggccacccgctggggccgcggggccgccgctctggcccgcgtggggcagtcgtccgcgtctcgctcatgatgacgcacgtccggggcggtggggaaggcaagatggcggcgcccatggaggtggccgtgtgtacggactcggcggccccgatgtggagctgcatcgtgtgggaacttcactcgggcgccaacctgctcacctaccgcggcggccaggcgggaccccgcggcctggcgctgctcaatggcgagtatctgctggcggcgcagctgggcaagaattacatcagcgcctgggagctccagcggaaggtgcggcggtgcggtctcgctgctggggtcatggggcgcccgaggctgaagtcgggggatgggttggtgggggccgcgtgcacccttagtcggaattggcgtggggaggggaggtggtctccgttcgggcgctctgcgcatgcgcgggtctgggggctttggggagatacgtgcgacctgttaggccgctctgcgcacgcgcggggctcaggcctgagctgctatgggggcagtgggggaaaatgggagacgctccggggggtcccttggggcaattgcgcatgcacgagttcttggagcgcgaaatttgattaaaaggggcctatgagctctgtggatgttgtggttctggaggaaaagggagaaggaccaaggtctgggggagtctcccatgaaggggtggcgcaggaaactcatgtttattcctccaataaagcaacagatactcaccgtcgcccacagtttcccctctactcccaagcccaaatgcagccagtccctgaagctactcgcttcccccgtgtgcccgctgagatctcttgggactggctctgtgctccagcattgcctgatggagtctacacacaactcataaatttctcccattttattttagttttgagacagggtctcactctgtcgctgaggctggagtgcagtggtgcgatctcggctcactgcagcctctgcctctagggttcaagcgattctcgggcctcagcctcctgagtagctgcaactacaggcccgcaccaaccaccacacccggcccacatttgtattttttgtagaggcagggtttcaccatgttggccaggctggtctcgaactcctgacctcaagtgatctgcccacctcagcctcccaaagtgctgggattacagccgtgagccaccacgcccggctgagttttcccattttagagaggaggaagctgaggcttggggtcttaggttggacattatggatagaaggattggggcacaagcctactgggctcttgggccccagtgtccttctggatcctctttgttctgttcctgtactcctcccacccagggcccctctgaccctcagaggaagcaccaacctcacatctaccacctccagcctcgaagcctcttgcaggggcgaacacttccttgctggaccatgcatttgctcaaaccaccctgctcccgactcctcttcctggttctctgacttagccattgcccaggcgtcccctcccctcgccctccactgctgtagtagctcccgtgtcctgcatggggctcacgaggctgactgtgcatccttaggaccagctccagcagaagatcatgtgccccgggcctgtcacctgtctgactgcatcacccaatggtctctacgtcctggcaggagttgcagaaagcatccacctgtgggaggtaagaggagcaaagcgtgagcgtttcccacaggacatctcagcccatctgagctttgcctgcagggcaccagggaacaaccatgcggcctggggccctgggatgggtgactgctcaggggttatagcctaagcttcaccctgctgcctcctttctccaggtcccctcgagacttgcgaatcccagaccagccctaatcctgccttgagtgcttggatagagcccggtgcagcccagtccccggcactcacacaccgcagcatcttccagggctagcgggcatctcttccacgcaggcggcagcgcctggcacttgtgacttgaaagttataaagggcggccgggcgcagtggctcatgccggtagtcaatgcaacctctgcctcccaggttcaagcaatcctcctgtctcagtctcctgagtagctgggattccaggcgcccaccaccacacctggctaatttgtttgtatttagtagagaagggcttcacaatgttggtcaggctggtctccaactcctgacctcaggtgatccacccgcctcggccccccagagtagtgggattacaggcgtgagccaccgcgcccggccagtgcctcctttttcttaccgctggaccaaccaggtgacagcaactcctagacacactcacagcccggatcctgccatgctctcactgcgagacagagtgaactgttcaggctttgcatttaggccagcttctcagctctgccctggtgaggggaagcagccctggatgatgtgtgagtgagtgggcacagagatgtgccagggagacttcattcacaaagtcaggcctcttggagtttggcccataccgtagctgtggcgttagatcaccggctgtgttgtcacaaatggtccattatatttcgggggagacctgccctcaaccccacatagagcagggcagacagtacaagatctggggccagaagacccaaaggtaaccatgtttctgcccttcctgaccttgtccttgcttccctcagtgggctgctcagagaactgagagggctgggtgggcatgagcattctcggagagataaaaaagccaccaggggatgggcatggcggctcatgcctggaatcccagcactttgggaggctgagacgggcagatcacttgaggccaggagttcaagactagcctgggtaacatggtgaaaacccatgtctgcaaaaaatagaaaaattagctgggcatggtggcatacacctatagtcccagctttttgggaggctgaggcatgagaatcacttgaatccgagaggcggaagttgcagtgagatgagattgtaccactgcactccagcctgggtgacagagcaagaccttgtctccaaagaaaaggggggtcgggacaggcagcacaggaatgacaggaggcatcattatctcaccctcaggacacgtgtgtatgtatttaatttttaaacttatttttgagatggggtctcactacattgccgtagctgctcttgaactcctgggctcaagcgatcctcccaggtagctgggattataggcatgtgccaccatgcctgggatcccaaggcttttacatctcactccatgattttgaaactaggatgcagttgctgagagggaaactgaggcagggaagcagtagctcacgagtcacccctaacagtagacctcctagccctggttgctgtcagtctggtgcagaggggcatgtgggtaggaattaaatgtgtcatcgccccatgggggatgtcttaggcgggaccccttcctgttcttggctcgggacagtgtgctgggtggcacccactgccagacccctgctcccctagccgcctccagtttttttttttttttttttttttcagatgaagtctcgctctgttgcccgggctggagtgcagtggctcaatctcagatcactgcaacctcaggctcccaggttcaagcgattctcctgcctcagcctcccaagtagctgggaggcgcccgccaccatgcctggctaatttttgtatttttattagagacggagttttgccaggttggccaggctggtttcgaactcctggtctcaggtgatccgcccttctcagcctcccaaagtgctgggatgacaggcgtgagccactgcagctggccctcctggagagtttctgacccgtgagctgtgaccatgaaggggtgtcccacatagccagagctcaggccgggactgcctccactgtacccccctgccacggtcgaaatcctcctcctgttctctgtgtaggcgacgggtgtgtgagcggtgagtcaggagtgggctggaaacctgagagccagggctgtggggcgggagctggtccgcccctcccacgccacagggacagggacctcccgggaggcactgatgttctgaagctgcccggtctgtcccggccctgggcagtggtggtcaccagagctgccctctgtggtttggggctgacctggatcctgcttcctctggtgccatttaaccctccccagccaccctgggttttgcatgcgaggaaagcgaggcccagagagggcatggctgtcagatctgggcccagcaggctctgcctgccccaacaaagcacgacgcacagggactttcgacaacagaaactcggcccccatccttgaggccagacgtcctaaatcaagatgtctgtggggccacgctgcccctggaggccctgggaggagccttcccacctctccggtggtggccggcaccccttggcacccttggcttgtgggtgactgtcccctgcctctgctgccaccactgccgcgtggagcccctgtgtgtttgcacttctctcagcttacaacaaccgggacacatggatggatgcccccgctccagaaccacctcatcttaacttatgatatgtgcagagacactgcgtctaaatgaggccattcacaggtcccaggtcgggacttttaacatgcttttggggggaaacacgattcaatccacaacccccaccagagcatctcagctctcgaatccacaaccccccacagagcatctcaggcctcgaacccacaacccccaccagagcttctcagccctcgaacccacaaccccccagagcatctcagccctcgaacccacaaacccccccaagagcatctcagtcctcgaacccacaaccccctccagagcatctcagtcctcgaacccacaaccccccccagagcatctcagccctcgaacccacaacccccaccagagcatctcagccctccccaggtgtcctggaaggggctccctgtcctcttcctcagatggagctgcctggcttcctgccggagcttaagctgccaccaccctgggtcaggccaccacagcctgcccagaagcgacttcctgttgaatggtgggagccgcctgcaggtcctgagtgcagccgttcctacggggcccacacaggacgcctggggtcaggctcacaggggaccagcacctccctgaggcagcagggaagggcaggaaacttgccccttcctgggccatcatgcaggtggggacgaggcgggaacaggtgcccacccagcccaggcaggggcgcgacgaggccccgctgtacctgctggccgctgccctgacagggtcaccccgcagtcctggggcagggcaggcagggggcgacagtgtggccatggccgtgcagtggtgggttcctggggctgcagcccccctttcctcccctggggctttcctcccctgacctggataccctctgcccctcacaggtctccaccgggaaccttctggtcatcctgagtcgacactaccaggacgtctcctgccttcagttcacaggggacagcagccacttcatctcagggggcaaggactgcctggtgctggtttggagcctctgcaggtagcgccttgcgcactcaggcctgcacctggaactgcacccgggctcaggcggggagaggaggcgccaaggcccctggcgggaaggggcttctctcttgggggctggagtgcagaggacggagtgatcatcccaggggtcctggctgcccacactggggtctggtttgttctgggggccgtgggggcccagccttgagtttactcaggtgaggcaggccaggctgctgagtggaggcaggtgtgtgcgtgaggtgggtgctggaggcgtggactgccctgttccctccgctccccgcctgctgagcacctgccccaccccgctcagcgtgctgcaggccgacccctccaggattccggcgcccaggcacgtctggtctcaccacgcgctccccatcacggacctgcactgcggctttgggggccccctggcccgggtggccacctcctcactggaccagacggtgaaggtacgccgcccccaccccaccacggtccatgagcggagcccagcagccgcaggtcctcagccaggaatgcaggaatcgcctcctcccgctccctgctgtcaggactccagacggcttttaatcccctggtgctctgagcccaaggacgtccagggaggtctgccagcctggaaattcctactcattcaccgtttctggcccggctccctggccaagcctggggaatcggaggtcatcactatgcttgagtcgtgaccggtggtcctgggagggagaaccaggggtcatcagccggagaccaagctccatttcagcacaggccatgtcccctggcccccaagacccacatggtgacggctttcacccaaagtcgcaagccctagggccagaggacagccgacgcctgacctccctggtgcccctgttcccatggggtcctcgggttccccctgccgggccgagccccacgccctttgcccacccgcagctatgggaggtctcctcgggggagctgctgctctccgtcctctttgacgtgtccatcatggcagtgaccatggacctggctgagcaccatatgttctgcgggggcagtgagggctccatcttccaggtcgacctcttcacctgggtgagtgccgcggtctgcgggctgcaccctgccctggggctgagggcatcgggcctgcggctcacacacgtctcggccttcgcagcccggacagagggagaggagcttccacccagagcaggacgccgggaaggtcttcaaagggcacaggtggggacgtgggaacggggcgggggctcccaggcacgtcctgtctggcacgtcccaggtgacccctgtctgtctgtccaggaaccaggtgacttgcctgtcagtgtccactgacggcagcgtgctgctctcaggctcccacgacgagaccgtgcgcctctgggacgtgcagagcaagcagtgcatccggacggtggccctcaaaggtgggcgcgcctctgctcggcccgcggccagcgcgcaggggaaaaagccagcaggagctccgggcttggcttgggtgggggcggggactggtttgctgtggggcggggccgggctgggggcgtggactggctgtggggcggggcctggctgggggagtggactggctgtggggcgtgggctggctttgctgtggggcggggcctggctgggacggggcggggcctggctgggagcgtgaactgggtttgctgtggggtggggcctggctgggggcgtggactggctgggggcgtggactggctgtggggcggggcctggctgggggcgtggactgactgtggggcggggcctggctgggacggggcggggcctggctgggacggggcggggcctggctgggggcgtgaactggctttgctgtggggtggggcctggctgggggcgtggactggtcgtggggcggggcctggctgggggcgtggactggctgtggggcggggactggctgggggcggggactgccctggatggggcggaacttggcttgctgtggggtggggcctggctgggatggggcggggcctgacctccgcgccccccaggcccagtcaccaatgccgccatcctgctggcgcccgtcagcatgctgagctcagacttcaggcccagcctgccgctgccccacttcaacaagcacctgctgggcgccgagcacggggacgagccgcgccacgggggcctcactctgcgcctgggcctccaccagcaggtacggcccccagcagggaacccccactgcccttttgtcccggaagaccccgcgggccctgggctccttcgctcccttggtcctggcgcccgtgcggcggttccccacaagcccggcactggagggcgcgtcctgtgagtgggatggtgatgctcggtggggcctctgcccactctcagtatggacccagaggctctgagaagttaaccacccctcttcccccggccagcagggccgagctgcacgccccacacaccagccttcctgcggctggatatctgacagtcagttaggtctttctgcaaaaggccgatgccccatacttcgggctgtgagagccaaaaggttcacgtctgggctgccgaaggtgcaggagcagccgtgagggcagggagcgggtggggccctggtggctgcaggtggctcccacgtgggctgggggcagcctctcggcctggccacagtcacgccctcactccctgcagctcagcaccgacccccgctctgtgcaggtactagggtgggctcccttaccttctgagggtagagtgacttccggaacacttcccaccccagccccaagaccctcatagaagccagtgtggttggctgggctgggctggggtgggggctgggggttccttgggcctggggaggcttcccagtgtgtttccgcctcactccccgaccttcgatgagctgcctgcgtccttggtgtctcacgtcactgtctgtgtccctcgctgggctctggcgcttggcacttctccccacgcgccctcttcttacctgagtacagattgatttttttatctggagggtgcccgacagcctgatggcctgacaggccctgcaccaggagatgccgttatctcccttgtccgtgcttcctcatggagtgacactctgttttcccacatctaccagtgggcttggggcgggcaggcaggggaccgccaccgtctgggcatccgcaaggcccctcagactgcaaggaggccaggagcacaggctggactgactgctaacagcgtgggcgcaaggaggggcgagctttttgttcagaaagtgccggaactttcggagtgaaaacaggcctccagcggcagagccagctccacgctagggcgcctgcccggccactgcctcctcctagggcagcagcggttcccacgattcctgcccagccaagcgctctccctagaaccccacctagttggccacagtgggattccggagggggccaggccatgccctccggtaatgccgccacctttccctagccgccccacctggctcccttcctcccgtgacggctgctagtcctctgtgacccttgttccaatccagctgacactggaatgttggcctgtcccacagacaggcgctgctggggcccaaggcgcttcgtccaggaggcgggttcccgacctctgatcccccagcaacgtccctccatgtaactggttcctctgtacagggcagtggccttgctgggccggccaggctctccccatggctggaggtgctcactgtctgtgaggccctcgccaggccctgtgtcccagagccttccctgggcttgcgggtccttccaggtctggcccaggcccctgtctgtggtgtggccatctgcacccccatccccagccacatccttgggcgcagtcgtggaggatctgaggcgctgggtaatgactgcatggccagggtcagggttgtcatctgcaggctcgacggaggtgaacgcccccgtctcagtcttcccttctgtctgtgggcgtcacggtggcccctccctggctgagtggctgcccacgctggcgggggtgggatgggcaaagcgtgtggtgtgtgacaggacgcgccccgaggtcacgtggctccctgtgttacagggctcggagcccagctacctggaccgcacggagcagctgcaggccgtcctgtgcagcaccatggagaaggtgggcggggcctcgggaggggcggggcctgaggctggggtcagtcctggccagtgggggtgagtggcccccctccagcacaccccaggccacttctgccctctgaccccgacttctcccgcagagcgtgctcggcggccaggaccagctgcgcgtccgtgtgacggagctggaggacgaggtgcgcaacctgcgcaagatcaatcgggacctgttcgacttctccacgcgcttcatcacgcggccggccaagtgaggcccggagaccccggcccgaggcgcccaggcctgagccccatgcctcccagcaaccagggcccgcgggtgtggcccccaccagcccaggcctggactctcctcagttctgtgtcgtgttcgggtttttcctctgtgactgggccgtcttggtgtctcgtggcacgcgtcacagtggtgctagtctgtttttaacaaaagaggatgaaaagcccctcctctccggcctccttgtgtccgggtgtggcctggtgctgcgtgcaacacagctcccctgctgctcggcccagctgggaccccagccccactcggcaccctctgtccggaggtgggggccttaaccaacctaggcctcgcgggggcggctttaagagggagccccgagcacctgcagttctgactctgctctgttgcccgagggcctttgcatggccgccccctcccgagaaggcgctggaccggggtggtgggattgaggaaggaaccgggaagccaggcccctccggtctgctgtgcagggggtctgagtggagacagccctgtggggtcccggaaggaggtggcttggtgtagagagacgggcctggggacgtttgggggtggacccagccgccagggttgaggggtttccccgggtgcaggacccagctctcagggagggtttcgggggtccctggtccctgtggaaacgcagggctcaggaccaggcaggaggagggagctggtgtgggtggggccttggagcacaggctcctcccagtgcatccctcgggtgccttggggcccctgctggcttccccagggcccagctggagccgcccaagggtgaacccagggtggttctccgggcaaaaggtgccacggcctccccaggcagaggtggcttgccccacccagcaaaggtggccactgcaggctgggaccgtcagatgggtcaggagcaggtctgggggtggtgtcccgatctgagccggtccccagagggagttggacccctgccacaccacaagccgtgcttgtgggtatcaagggcttgagggaggtcaggccctgctgccctggggacgctgccacccagcgcctggatcccagcccagaagcccagaaccttccagaaagctgctcccgactgacagtcctacctaacgatccagaaaatccgtgtgatttagcgggcgtggtaatgaccgcagtccagccagccgccagcgctgagttcatgcttttaggctaatttgtgttcttgtcccctctatggggctctgagtcctctcggctggcagcctggccacactgcatcagggcagctgggccctcacctggcactgacatctgcctcggctgctccgagccctgagaaccactccagggtcccttccccctgggcgcacggccagcttgttccttttccatcatgaaccactcactctgctgacctgcaaggctgggtcctgcctgcggggagcacgcggatttggggtgaggcagctggggggtcccttggggttggctgatctccctgggtctgtacctactgttcccctggagccattcccacgacccctgcccccctccgcatcaccacccaaaggctcccaaatttccctcccagcaccaatcaggacccccaaccaccaactcaagggtatcggcacaaccctgtggctggtgccagggcggggtgagggtgcgcagagccgtagagggacagctgcctggggctcccagggcccggactcggctccagccgctgcaagagcccaaggtgagccaggcacgaacatccaggtcacttcgcagctgcctgcaccacgcggccgtccggggctgaggtcggctgccctctccgcaggctgcagaacagggttagagttcaccgtggggcagggcccgaaaatcgcccggtggcctcagacaggcgacacctggccgggtcggactcgacgttcttgtctccagaaaggggtcgtcccccggcgggtcggctgggagctgggcgggggcggcaggagctcacgcctcattccctgcgtttccctccatgtgcccctgcacgctgggtccttggacacaagccccctcggtgcctctccacgcccgctcccgcaccgtcatcaccctctcggcccagagctcccagacgtgctcaggcaccgcggctccaccctgcgtcgtaattgccggtctgggtgcgatggaaacagtggtgacgtcatcgttcagaccccccgcccccggaggccccacagattctcagagggacggcgccgggactggggaggccaaggcgttgacgagcggggacgccggtgtgcacaggtgacctggcggctggcggggcttgactgtgcagaccacagtgaggtgcgcttgcgggcgccgggacagctgccagcaaagctgagagcagaaaacatcatgcgcgaggaggtggggaagccacagccttcccgtgccctggtgcggacataaaatggggcatccactgtgaaaatagtctggcaggttttttgtttgtttttgtttttgtttttgtttttttgagactgagtctcactctttcccccaggctggagtgcagtggcccggtctccgttcactgcaacttctgcctcccgggttcatgccattcccctgcctc[222 bp omitted]tggacccagcgagtccacttctgggtatatacccaagggaatgaggagcagggtttgggaatgaggagcggggtttgggaatgaggagcggggtttgggaatgaggagcggggttttgaaatgatccacacaccaagctcacaacagctccatccccacagccaaaaagtgggggaaggccaggcgccgtggctcacgcctgtcatcccagcactgttggaggccaaggccggtagaccacctgaggtcaggagaccagcccggccaacatggtgaaaccccatctctactaaagatacaaaaattagccaggtgtcgtggcacgtgcctgtaatcccagctacttgggaggcttaaggcagaattgcttgaacctgggcggtggaggttgcagtgagctgagattgcccccctgcactccagcccaggtgacagagcaagactccgtctcaaaaaaaaaaaaaaaaaaaaaagttggggaaaccaggtgtccatcagcggttggatgggtcaccacaacacgagtcctctgcacagtggaatattattcagccttgtaaaagaacgagaaggctcaatgcagtagctcaccctgtattccagcactgtgggagctgaggcaggataatcgcttgagcacaggagtttaagaccagcctgggcaacatctctacaaaaccccatctcttcaaaaaatataaattttagccaggtgtggtgtgcacctgtggtccccgctacttgggaaatcaaggcaggaggatcgcttgagcccaggaggttgaggctgcagtgagctatgatctcactactgcgctccagtctgggcaacagagcgaggtgcagtctcaaaattaaaaaaataaaataagtgaggctcagacacaggccagagcatggttgcaccttgaggacatcacactcagtgagagacgccagacacaaaaggacacgtcctgtctgattccactcctaggaggtccctagagttgtcagattcacagagacggagaggataggaggcgtcagggctggggaggggacggggagtgagtgtcccctggggacagagtttcagtttgggaagatgagaaagttctggacaggagggtggtaagggctacatagcaaggagtgtgcttaatgtgcctgagctgtgcacctagaaatggccaagatggcaggtttcatgttatgactattttcccacaataaaacattttttaaaagtctcctccacgtggccacttgttccacatggcagctgggagtaggaacgcctactgttgcccgtgtacagatggggaaactgaggcagggcacgagggtgagttcccggagggcagacacagtctctgcccctaggaactcttgctcctcagagggagccgaacccagggagggacggggccccagtggtccctgaggacaccaggacccagcacctctcgcagacccagggaggggaccccttgtcctgcccccggggacacctggccagggggctggagggggtggcctgcgggttcctggaaccgagccatccctccctccgtccctccccagtcgtctcaaaatccaatccattttactggctggcacttggcattttattcatttcatggaggatttttttcctacctctccaacgctggctccaaaaggagatgacgtttggggtgtgtgtgtgtgtgtgtgtgtgtgtgtgtgtgtgtgtgagaaaatcgccggagtgtagatccattaattagagctgaatgttcccaacacagcggctgttctgctgccccgcgggatctggggagacaccgtcgggaggacaggatgaggaatgcctgggcagggaggaggtcctctgctagatggatagacggatgcagccgcccccatctatcaggcgcctgtgggatgccagggccccagaaggcaccccccgaggcccagaggacataggcaggcttggggactggtagacagcggggagctatggaaggctctagagcactggaggaggggcatgtgagcaagcatccttgtctgggccgttgctcaagccacaagcaattatagagtgcctactgtgtgccagcaaccaaaccagacccaccccaaccctcccagagctgagttgaagagatggtcactaaataagaaggaaatgaacaaaaagatggtaggccgttatggaaatgtgtggaggttgggggtgggtagcagcaggactgaaatggggcagggagtggtgctttctgcattttctcagtggcaagcagggaacgtttttcagggcagggcatttgggactgggttttgaagggtgaagaggagttctgtggcccaagttgcctgcccactgctggagggcagatctactctataggtttccatcagacatgcctgtctcagtttccccagggtgcactggatgttagaacacacccctgggctggcctggttagaaactgacagctccctggatgtgcgagacaagcaagacccttcctgggcctcaacttccctgcctgagcaatggtcgacattggtggaaggggtcagggatcctggagaggaacggggtgggcgtc[132 bp omitted]tgcctcagcctcccgagtagctgggattacaggctcccgccaccacgcccggctaatttttgtatttttagtagagacgggctttcaccatgttggccaggctggtctcgaactcctgacttcgtgatctgcccgcctcggcctcccaaagtgctgggatgacaggtgtgaaccaccgcgcccggcaagtcggggccaattttaaagcgcagtcttttcctggcacctccgttccatctgtggcctgaatcagagcagggatgggcagtggttaggcgtccccggcccccgccaggtgtcaccgccgccggcctcaaacaaccactgggaggcactgtttcccccccatcccgccctgggcagggcacgtcccactccccccgcgcggttgctgggaacccggaggccgcccgggcggagcgcggagggcgcgtcggaacctggccggggccctccacccgcgccgtggtcccggtggttgcgccccgtggcgagcgacgccgacaactttgcgatggagtttgtgcgggcgctgtggctgggcctggcgctggcgctggggccggggtccgcggggggccaccctcagccgtgcggcgtcctggcgcgcctcgggggctccgtgcgcctgggcgccctcctgccccgcgcgcctctcgcccgcgcccgcgcccgcgccgccctggcccgggccgccctggcgccgcggctgccgcacaacctgagcttggagctggtggtcgccgcgccccccgcccgcgaccccgcctcgctgacccgcggcctgtgccaggcgctggtgcctccgggcgtggcggccctgctcgcctttcccgaggctcggcccgagctgctgcagctgcacttcctggcggcggccaccgagacccccgtgctcagcctgctgcggcgggaggcgcgcgcgcccctcggagccccggtacgcgggacgcccggagtcaggacgagggggacccggggcgggagcggggtcgggagccctggggacgtccggagtcaggatgggggtgccgggactacgcagggaagggggatcccgggacgctggacgggccccagggatcagggatggggaagacccgggtgtccccggagcaaggaaaccagaacccagaggaagagacccaggggcagggacctagacgcggggttgagagctccagggacgcccctggaacgcccctgcagaccccttcccagcgccctggtgatggggaccccgccactgtggcctctgccccttccttgcccaggccccttccctccttccccacagacccttccctggtccctgggacctcctggtccccacccggctctgggtggctgggctggaggacaggcggtctccctcctcactctaggggtgcagtttcggggtctgcaggtctggatctccctccttccagcattctccccgtcccctcccagaggcctccaagatcccagagcagcctccatcattccaaccccgactccattcccaccccccaacccctggcagccttcaagttcctctcttctaaccccaccccaggcccagatcccgggaggaaacggaagaagagaagggcgattgactgggttctggggtccctgttgtcccccccaacagggctcactgcgccccagataacaagccccctcccgtggccagcaaggaggtcccaactccggacatgggcctggctgagctctatgccccagctgcccctccttcccaacccactcagaggcccctccagcccctccctctcctcagggagggagaccctgacgctagagggggggtctcttagcccagctctccaggtgtcaaggggacccctgtccccccaccgccctagggctggtgggagaggcggggcccaaacccaggcctggggcgccctctgctgccgtctccaggagctgcaccgccgcaagccggggcgtgggaccgacctagcgtcttagggactggcttggccccctggggactgagccccatcccaagcccatcctccagcactgggcaccctgcttccaccctgggaagcgccctgccaacccgaggggcctggcaaagctctcccacctttaatatactaagttaaatccagggccgggtgcggtggctcacgcctggaatcccagcactgtgggagcccaaggtgggaggacagcttgagctcaggagtttgagaccagcctgggcaatatggcgagaccccatctctacaaaaaatacaaaaattaactgggcgtggtggtgggtgcttgtaatcccagctactcaggatatatatatattggctggg[138 bp omitted]aaagctgggagtggtggagcttgcagtgagctgagatcacgccattgcactccagcctgggagacagagcaagactccatctcaaaaaaaaaaaaaaaaaaatccaggagaactttctggatggcactgggcacaagggggcccctcagccctccatgtgcctggcacggggcagtaatgtgtgaaggggatgctaggggaagctacctggtttggctctaagcacaaggccatcggtgggctcacctttatgagccacagctcttggccctagaggggttcccaggcaggtgggtgccaggtgaggtcaggactgtaaaggaatcagggagggacctgaggctggaggcgttccaagctggagcctgggctctgcctggaggatggagaagtctgaatagaggaggagcaatgtgcttgggttttgaaggatgtgtaggagttggtgggcatagagagagaaagatattccatccggggaatggcacatgcaaaaaaaaaacaaaaaacaccaagtgtgcccatgacaagggtagctggagccaagagaggctgggagactgagctttgtggggatggtgatggggaacgatggaagggtttagagcagggctggggctggggggaggtggaggggaggtgcagccatccagctggcatctacttgcggatcacccgctgctggggtgggaagggttttgtgggggtggaggtcgtcaaccctaaccgtggccacccctctcccagaacccattccacctgcagctgcactgggccagccccctggagacgctgctggatgtgctggtggcggtgctgcaggcgcacgcctgggaagacgtcggcctggccctgtgccgcactcaggaccccggcggcctggtggccctctggacaagccgggctggccggcccccacagctggtcctggacctaagccggcgggacacgggagatgcaggactgcgggcacgcctggccccgatggcggcgccagtggggggtgaagcaccggtacccgcggcggtcctcctcggctgtgacatcgcccgtgcccgtcgggtgctggaggccgtacctcccggcccccactggctgttggggacaccactgccgcccaaggccctgcccaccgcggggctgccaccagggctgctggcgctgggcgaggtggcacgacccccgctggaggccgccatccatgacattgtgcaactggtggcccgggcgctgggcagtgcggcccaggtgcagccgaagcgagccctcctccccgccccggtcaactgcggggacctgcagccggccgggcccgagtccccggggcgcttcttggcacggtgagtggggaccctgcttcccttaggagggtgtccaggc[131 bp omitted]ccggccaacatggtgaaaccccatctctaccaaaaaatagaaaacattagctgggcgtggtgacacgcacctgtagttccagctactcaggaggctgagatgagagaatcgcttgagcctgtgaggtccaggctgctgtgagctgagatcgcaccactgcactccagcctgggcaacagggaccctgtctcaaacacacaaagtcaggatgctttgttagatgtcttaggtccccggaagcagtgcccacctggggaactatctcagggacagcagagaacgagctgaacaactaggagggagggaacgggtctctggctgagccctggaggagttcctgagaatgaacaactcctggaaacaggtgaccccagctgggtgcttgtgtgtcagtcactggcttcaggcgtatgtggagtgggggcacagccacggcatcgggcacggatgccccgggatcaaggggttaggcttggggactaggcttggggacaccaggagcgtccacgtttgtcctcatgatacggacaagagcgaccagtgggaatcgggcacgtgctgggcaggggtgagaggatggaggggtgtgaacttcgacacctgacaccccccccgccctgcccctaggttcctggccaacacgtccttccagggccgcacgggccccgtgtgggtgacaggcagctcccaggtacacatgtctcggcactttaaggtgtggagccttcgccgggacccacggggcgccccggcctgggccacggtgggcagctggcgggacggccagctggacttggaaccgggaggtgcctctgcacggcccccgcccccacagggtgcccaggtctggcccaagctgcgtgtggtaacgctgttggaacacccatttgtgtttgcccgtgatccagacgaagacgggcagtgcccagcggggcagctgtgcctggaccctggcaccaacgactcggccaccctggacgcactgttcgccgcgctggccaacggctcagcgccccgtgccctgcgcaagtgctgctacggctactgcattgacctgctggagcggctggcggaggacacgcccttcgacttcgagctgtacctcgtgggtgacggcaagtacggcgccctgcgggacggccgctggaccggcctggtcggggacctgctggccggccgggcccacatggcggtcaccagcttcagtatcaactccgcccgctcacaggtggtggacttcaccagccccttcttctccaccagcctgggcatcatggtgcgggcacgggacacggcctcacccatcggtgcctttatgtggcccctgcactggtccacgtggctgggcgtctttgcggccctgcacctcaccgcgctcttcctcaccgtgtacgagtggcgtagcccctacggcctcacgccacgtggccgcaaccgcagcaccgtcttctcctactcctcagccctcaacctgtgctacgccatcctcttcagacgcaccgtgtccagcaagacgcccaagtgccccacgggccgcctgctcatgaacctctgggccatcttctgcctgctggtgctgtccagctacacggccaacctggctgccgtcatggtcggggacaagaccttcgaggagctgtcggggatccacgaccccaaggtgggcggcctcggggggctgcgggtggccttggggggctagcggtggccccgggctgggctgtgtggggcaggggtggtcagctggacgtggaggacgtccactaggccaactctggtccc[137 bp omitted]ccaacatggtgaaaccccatctttactaaaaaatacaaagaattagctgagcatggtggtgggcacctgtaatcccagctactcgggaggctgaggcaggagaatcacttgaacccaggaggcggaggttgcagtgaatcaagatggcaccattgcactctagcctgggcaacagagcaagactccgtctcaaaaaacaaaaaacaaaacaaaaaacacagagatggggggctggctat[141 bp omitted]ggctggagcgcagtggcacgatcttggctcactgcaacctctgcctcctgggctcaagcgattctcctgcctcagcctcccaagtagctgggattacaggtgtgcaccaccaagcctggcttttgtattttcagtagagttggcgggtttcaccatgttggccaggctggtctcgaacccctgacctcgtgatccgcccacctcggcctcccaagtgctgggatcacaggtgtgagccaccacatctggcccgtattattattatttttttttgagacagagtctcactcttgcccagagctggagtgcagtgatctcagctcaccgcaacctccacctcccaggttcaagcaattctcctgcctcagcctcccacagtgctgggattagacgtgagccatcgtgcccggcctccccttgtaatttcttggcaaagtcgggttttctgccccgtagtgtctctgaacttttggatctgcccagtggtgtcccctgggggtgcctggcctgctccccagcccctggtgtcccctgtgaaacggtagtaaagcgtagacgccatgctgtcaggtgagccgactgctgccggcggctcttccaatgtaaacgctgcacagctgagccgtcaaagccttttcatcatacggaaacttccatcagatgctgctgacccacaggcacgatgggattcaagtttgggtttttggtggtgctggaatcccgtggggaggccgtggctggtgtgacctcagcagccagacccacctactcattaggggtctgcaccaggttgccctggcagctgtggggagaacagaccacgggtggtgcagggaggaccccgcagaggggcctgggctggtcgaggatgttgatggggaaggaggctgggttcgacgctgggccccaacctgggtaggagctgtggaggggtgagcagtgggcagttccctgtgttgcaggtggcgccccccagggttttcgggagaaacagggtgtcagaggcagtgacgacagagctgcctccgcctggggtgggaagagcgagtgggggcagatcaggagtggggtcatggacatgttagagtggggctcccgtgggacccccaggggagaggcagaggaggtggtgggataggcgtccagcccagggcgaggtccaggtggagatggacttgccggcgtttagaacagagggtctccacccggggtgatcctgccccccgccccaggggaccctggacagtgtgtgtctagagacagctgtggtggtcacgcctggggtgtgctctgggcatggagtgggtggaggccaggaatgcagcctcggcgccctgcagtgcccaggacggccccaccccggagaacggcgcgcccctcaatggtcaggggtcctgaggggcaggcagaggcgctgacggggtcccccgcgcagctgcaccacccggcgcagggcttccgcttcggcaccgtgtgggagagcagcgccgaggcgtacatcaagaagagcttccccgacatgcacgcacacatgcggcgccacagcgcgcccaccacgccccgcggcgtcgccatgctcacgtgagcccgggcgcggggtgaggcgggggcggggcgtggggtgggcggggcgatggctgacccccgcccccggccccagcaggagcgacccccccaagctcaacgccttcatcatggacaagtcgctcctggactacgaggtctccatcgacgccgactgcaaactgctgaccgtgggaaagcccttcgccattgagggtgagaggcacctgggcgaggcggggcgccggggtctctggggacctcctgggggcagtggggagccacggagggttcgaggtgggaaggggcgaaatcccacgtgtgcgggcagagttcccctggggctgtcccacctggccccaccgcctggccccgcgcccccaggctatgggatcggactgccccagaactcgccgctcacctccaacctgtccgagttcatcagccgctacaagtcctccggcttcatcgacctgctccacgacaagtggtacaagatggtgccttgcggcaagcgggtctttgcggttacagaggtggggcagggcctgggacagagggtgggggtgggggtgggcgtggggggccctgagccttgtctgaagtgaccaaccccagtgctcattccccagacgtgcgtttgtctgcttctgcgcacttctattcaccctacaaaaccccggctgcagtgccccttcctccatgaaacctcactccccccagccatggagtccctgcctcccaacctggctccactgccccaagcccctctctctggcccaacctgttctcccctagttcaaggctccccaggggcctgccattacgtgaccgtgcggggctcctgctgtgttgcccccagaccctgcagatgagcatctaccacttcgcgggcctcttcgtgttgctgtgcctgggcctgggcagcgctctgctcagctcgctgggcgagcacgccttcttccgcctggcgctgccgcgcatccgcaaggggagcaggctgcagtactggctgcacaccagccaggtggggagcgggtgggcggcgggcggccccaccccccccgcctcctcgccaaccgggtctgtctggggtcttagaaaatccaccgcgccctcaacacggagccaccagaggggtcgaaggaggagacggcagaggcggagcccaggtaagtggtggtcggggcggaccacgatgcaggaccacccagacccaccaccccaccagctcgccccgaagccggccgcggggtgcaggaggttcccggaggtcccccgcccacccccggacgtgcacaccgtggctccctggttgtgcctgtcggccatcctctgccgtcagcggcctctgcagaggcccagggcgcgagacggctgccccggcggacactgaccaggccggttccgtccccagcggccccgaggtggagcagcagcagcagcagcaggaccagccaacggctccggagggctggaaacgggcgcgccgggccgtggacaaggagcgccgcgtgcgcttcctgctggagcccgccgtggttgtggcacccgaagcggacgcggaggcggaggctgcgccgcgagagggccccgtctggctgtgctcctacggccgcccgcccgccgcaaggcccacgggggccccccagcccggggagctgcaggagctggagcgccgcatcgaagtcgcgcgtgagcggctccgccaggccctggtgcggcgcggccagctcctggcacagctcggggacagcgcacgtcaccggcctcggcgcttgcttcaggccagagcggcccccgcggaggccccaccacactctggccgaccggggagccaggaatgaggcggcagccgggccgtttgggctcaagacacacacacagcgcagtgagccgctgtcaacagacagtttattctatatacaaacacaattttgtacactgcaattaaatagaatggaatgagcgctcctccgcattcctccccgagtgactggtttggccgccggcccactccatccccgagtgggactggaccacggccctggctgctgccactgatgttggcgcctgcaccccacgtccctatgcccgaggcgcaagctctgctctcccggggaccccaagcctggcgcacacgcggggagggcggggccatggagaaggcactgcagggagcaccaggcagagccgggctgaggccggccggcactagggcgcgaggccccaccccaagccggcctctcctccacacctccgccttgctcagagacctgcaccatgggaccccactccatcctcaggacggttcactgcagacctaccaagacccctccagaaccttccgcggaaccccaccccctctccttgctgaccagctcaaacacctcactagcgggtacaagcctcgggcgcgacctcacaccagggggaggaaagccgccttccgggcaaaccccacgaaaccctgaaagcccccgacacaggctgggcagtcccagaggaaggaggtggctggcctcccccacccccacgggctcgggaaggtcaggcccagccagcaggggtcagaggcggctcagctgtgcggctcaggaccccacctccgagggcgcctccgttggggccatggaggccgggctaggcccgcctaccgcagcccccaggggagttgtgtcagaagctgcggagtcactcggggggacactgtcctggggggcgtgggggaggcccccagcagggcccagcgggctggctggacgccgctccaggagggaggcgctcaggccggacaggaaggaggcgtctgtgatgatggcagcggtctctgccatccaacccaggtcaccaccggcagctgctgccactgaggctgccgcggccaccagggagctgggcgccgctgccacaggcccgggactcccgctggccccaggcgagacggggcccagggcggggggctggccggcagagtcaggggctgtagccggggcgcccgagttgttgttcatgtcatcgggcagcgccgtgggggtcccggggcccagtggcggcgcctgaagcagcatctcctggatgcggacctgctgcaggatggcaggcagctcgtagtggtggaagaagtagatcatggaatgctgcgggagggagagtgggagtcaggacgggcccgcccctgccccacccagccgctgctcccagagggcagcccacccgggaccatccacgctacctctgcccgcttgggccgaccccacagggcatcctccccggctgcagcctctcctgcctggaaaggcacggctggcctgccccctgcttgccgcccaggcctcacctggatgaagagccaggaggtgaccagggccaggctgctatactgcccattgaagcggtagtgataggcatagaaggcgaagtggtagagatagaagaacctgcggggcggggtgagggcgtcggggctgcaggtcccaccctgccaggcccagcccctggggttcccgcgtggcgcagccaccacccccgcctccagcgcccctccctctggcagccccctacccctgcccaccagcacccactccaccctgcccccgcgccacgctcaccgcagccaatgccgcttgctggtgctggtgtggcagcagatggcgtcatactggtccgcgagccacacgatgaggatgatgtagaaggcggtggtggtgtcgttgaagaactccgacatgatggcctccatccctgcagggagaggcggcgccggttgaagcgggcggggcggggtgcagcgcggggcgggggaggccgggtggggtcctcaccgacgagggccaggatgacggtcagcaggggcgctgcggggaaggcgatggccatgttcatctccagcatctgcagcaggtccactgcgggcacagggcggcgggcgcccggtgagggcctggaggacgcccgccccgccctgcgccggcgggacactcaccgatgaagacgaagatctggtggtgtgagtaccgcagcagcatggacacgctcagcgtctgcaaggggcgcgcaggaagcgctatgaggggctgcgagggcctgcttggctcccgcccggccagcccccgcacccgccccgaggcactcacgaagatgaccatgatggcgaaggcggccaggtaggacgtccgcgccatccacatgctcacaaagcggtagtgctcgcccgacaccacattccgcaggaagcctgcagcagaaggagccgtgagcgcccgcccccacccgcgccctcgcaccctcggccccggggcatgcctcacccttgttctcctcgttctcggccaggcccttcacgctggacatgaggatgtcatcgtagcccaggaactcatccagcagcaggcggctgaagcggtccccgaagcactggtcccgcgtggggtctgcgggtgggtgaatcagggagccgggagccccgcccaggccaccccctgggccctgccccagctggctccattgctgaggcctggcctgcttcctggccctgcccattcttaggaaacccatccaggaccccagccctgggaagcgtgcctggggcggggcagaccccagtgcttcctgcacagccccccgtcccgcaccagcaggaggagacccgagggaggaggggaggccccgccatggagctccccaagcccagcagctcagactcacccagggtgaccaccatgacggggatgctcaggcgctggcgggtggcctgcgacaggcgaaggaagccatactctagtgagtactccacgatgtactcgtcctgcggccacactgcagggcagaaccagggaccaggtcagcgcccccacacacgtcccccgcccactgccagcaggcaaggcaggcgttgaggggtggagggtgagacctgctgagccctgggccccaggtgggtgctgggaggacccctacatggacacttgggatggtgcccactcaagctggtgtcctgccctgtgcactgcagaggctggccaggctcctcctcccgtggccccctctccctggctggggctggctgggtgcagggctgccccactgccctggcggcccccagcacacccccaacacttcagaggccccggccctctggatagaccctctgctgccagatgggcaggggtgggggcgggggcgggggcttccctgagcacagcccgctagaactctgagctcagagccgaagggatccatcccctccaagtcgccgttcacgaggatcccagaaaggatgagctgagccagttaccccaggctctggggtgtccccacagcctcctgtgctgacagatggggaaatcgaggcacgggggtgccctcaacggtccaggacatgcagccagcaggctggggatgttcggagggaccccgcctgcaccccagcaccccatgactgaggcaaccccgtgaggcagtacacctttggtgggtggcctacctttggtgggcgtctcggggaaggggaactcctggctgtcattcagggcctctgtgctactcggcggcttgaacaccttgggctcgatgtccagctcaaactgtgggcgaccagggacctgggtgtcagcagcgccagcccgggctgtgagggcccagcctgaggatacagtcctgctaatgggaagggactggaagcctcagcctctgccccaccactgaccaggccagggtggactacgtgtgcctcccgcctcagctgggaccccacctcaacaccaagcctgccctgctgtgaggccatctccagcacagctctgaatcctgaagctgaggcaagggccagctacaggcagtagaccccatggaagggtccatgatgctctgcccaaacactcaaactcttggggttggctctgtgggaacaggtgggaccccaaaccctgactgctgaagcaaaaacatctcccaccaggctgtggggcccaacacagccacctggtcccaccagtgcccaaggccaccacaagctgaccgggaacccagcacctctgcaggcagtggggccacctcaggacggccaggatgggcccagagctcttagctttcagcccccaggcctcctcagctattgctgcccactgcatccccagccccagccaatcccctccccggaacagctactctcaaaggcccgagtctgcccagcccaagtcctccccgagatccccctgccctgcccaggcctctagcagggcgacaggccgagggtcttgcttcagagcccccaggccaccaaaaggccacggcaggcaggggcggccttgtctgcatgccaggtccctgaaagtcaagaaccccaacatcctgtcgatgtcaggaaccgccccttcagcgaccagcatctacggggcgctggcctctgctgcagctgagcccaggcctggctcaccttgatggagctgttcccaaacatctccatggtcagctcttcctcctcctcatcttccatgtccaggttgctgcctggttccacggccaggcccgggaagctcccgcggccgccgctgtcacagaactgtaggaagacgggcgcgcggctcgagttgtgccgcacttccacacgcaggatgccctcacgcggccacttgtcacgcacatgctccaggcagttgatgggcgagcgggagaagacgatgtggatgtaggccaggacgaagagcacaaacagggcctagggggcggccggcagtcagtggggcgccccagggccagctgcagccgacacccaagggcctacgtgatggggcgtgatggggcgcgctgggacgcccaggacggggaaaggaaggaaaccccagaagccgaattgggctctgaggaccctgggtccctcccacgctgactgcaccgggccagcccctcacatagtccaagtgactgaggatccgggggacgccccactccaaccccggaggggctctgccacctgcagcccggctctgacaggccctggggcttcggcaaggcctgtgactgccccgcacctcctcaggggtgagccggacgaagccagcaggccggggccctctcagatgcacacaggaccccccaaacctgggaggagacgaggctggactcagacccaccaagtggagcacaccagggccctctgccagccaacggctcccgccctgcaagcagcagcatgggtgttgccgccaccccagggccaccagctggacccactgtctacgaaagagggcacagccctccacagcccaacctgctgcttcctgcctcaccttccgctgcgtccccagcactcccctgatctcaccacctgaaaatagcttctctcacctggcggggcgccctgtgcaaccctcccaggcctggcggggccagccgcagctgctggggacacagtggacctccgtggctgggcagagcgccccacggcagggcgaggctgccgtgcccgaggcacaacctatgaactggggtgccagcagctctcacctgggggctcctgcccaggggatgcttgggacatctgtggttgtcacaattgggggagctcctggcatggagtgggtgaggccagggatgctgctcggcaccccgcagtgcccaggacggccccaccccgacgtccacagggcttggggagcccacgccccagcgtgctgcaggcacaactcagagtggggcccctctaggggcagttcagggcagcccctcttccagggagcccgcctcaccgtctggcggtttggctgcccactgtacctcccaacctgaggtccaggcatcacccccgagcctggtgagggtcacgtctacctgctgccccgatccgcaaaactgaggacccagctgggccaagggggcgcccacggccacatggaaccccagactctcagggaagaattgatcagactcaaaatcacaagccagagagcctggagcacagggcccctccgtgacccgtgacctgctggcaggtgcaccaatgcccggggtgcagtgagccacctgtggccgcacagccataggcaagaccaccaggagcctcaactcttccacgcccacagtgagctggggcctcctctccagaaccctctgtagactgagcaaagggccgagtcagcaaagcaacccacttccagcccggccgcagtgctgtgacctgtgggaggccctgagtctgagcacggataaagccctgggtctagccgcacgtgcacctggggcgagccccatcacactccccagccccaggagctggagaatcccttgggctgatctgaactgcatttctagtccttacagccaaaagagccgcaggggatgaaggctggcccggcgctgagatttaagcagaaacaggcaagagcagaaccctgaccgccaggcattcaggccccgcccacagacgccggagctacaaatgaggggtgggcggggggagggggcagggccctctgctggggagggttcccctgtgtcctggggaagacagggagggcagtgtggaaggggggcagccccggagcctgagatgctttcaaagcctagcgtttccccatatggcatctggggacaggagccacggaggctgggcccagtggtgggtcacggtcagagacactgaccccacagcccctcggctcagcactctcaggagagaggggcccgcgaggcccatggtggatgctgctggtggccacgctctgccttccaggcccacacatccagcaggagctgtgcccaggacagcaatggaccctgtgccaagatgttccaaaaagtgctgatacacagtgggccgaggtcggggctgtccaacgcttcacaagggacgcacggctgttaccatccctggtttatatacgaggaactgacacagaggtcccgacagacctggacctgctgaggtcacatggccaggagggaggggccagggcagtgccagtctgcacaattaaggccccacggggaagagcagctcctggggttgccctgggcagggtcagcttggtccagggtcagcgggagagggcacaggacacacatcctgccacacccagcactggtgtgagtgacccgtcccatgaagacagcggacgtgatgagagggcaccagtgttttcacacaatgtgcacacactccagtcaaagacttcaagtccaccagacgctatgactcagacgtcactgtgtctctgccccatcaggtgctccgtgctgaccgagctcagggcccctcttccctgactgagcatgaccagaaaaatgccccactggacaaggcccgttgccgccaaagcctcagctccccttcagtctcccaccacaaaacaaggagcaggcaccacccagccagacgcaggctcatcccgagtcccgggtcctcctccccaagacctgtctgtcatcagccaccctgcagcagccacctcaccaggcccggccctgagccacacgcccaggcagcctcgtccacgcccacagtaaccctccccagggagctcacctgcaaatgctcccatgggcccctggccaccctctgcccgcaacctggctcagccactcgcatgccctgggtggtccagtcccctacactccatgaccctgtccctgacccaggctccccagcaggcacccacatgctccagccccacggccttcccacacgctctccagctgcctggacaccccaccccatcccactggctgtggctcacctccaggaggccctgcccacccagcacaggagtcaccccacccctatgacccttccttcctccgggtcagcccacacacggctgcacccacaggagcacctcccccagcctggggccgtgctcaccgcctcctccaggaagcttcctggatgttctggccgaggctctcagggcaccccaacactcggccactgggtgggcctttcctttcctgtctccccacagacctggagtgccaggagcagcctgcccgctctctgggtatttgactgacccacagaccgacggacacacaagcccgcggagccacactctcctcccaggtgggacacagagccctcagccccagccaggaaacactacctggggctcccctttgtccacccggggtgcttcctgcctccaggccaccggggcctctccttccactgcagcctcacagtggcctcaatgtgacaggtcccccattcagagcagggcccctggggtctcacataccccgtctttaatcgtcacgaccccacaagaggagccccattactccctgtggctaggcgcgggcccctgcccatgtccaggggtgctgagtcgagaccccttcaccctgtgggcatccacttggtggtcacctgggtccagagcccaaccgcacaggtgcaggcacccagtgccccaagatggacagtctctgccacactgggctcagggccatgaaggccagcagaggtggatactgaggctggatggaggtctcccgagggcccctggaacacaggcccctgccgcctcctctctccccagcacctggcactgcctggcatttcctaaagccacccaggcatggatgagggaccggggggctccatgctggctcagagctgggagatcctggcatttcctaaagccacccaggcatgggtgagagctgggggactccatgccagctcagggctgggagctcagctgcacagatgccacaggatgaagccaccttgaagggatcataccagggaggacctggctctctgcagggagacccccggaagccaggcaggcaggaagcagaggagccttctggaactcaaggcagcctctgaaatcaggcagttccagcctgcactttgcagataagtaaaagtgaaggcagcagggtcagattctgtgccaccagattaccgggtggaaaattcacaaagaacagatttccccacccaggccaggcatggtggctcacgcctgtaatcccagccttttgggaggccgaggcgggcagatcacctgaaatcagcagtttgagaccagcctagccaacatggcaaaacccagtctctactaaaaagacaaaaaaattagccggttgtgatggtgggcaccggtaatcctagctactccgcaggctgaggcagaagaattgcttgaacccaggaggtggagtttgcagtgagccgagatcaaaccactgcactccagcctgggtgacagagcaagactccatctcaaaaaaaaaaaaaaaaaaattcaccacccagagatctcacagtccaaagccctctgctgagagaggagggattggggttactgagaacctcccaagagtctccaccctacacagaagacggggaactccagctctggcccagccccatctgaccacctgtgagtggtattggcctggagatggagccgggtaggcttgatccctttccaaaccgggacatggtgggaccagggcccaggcgacagggatgcacctcccaaggaggctgagctccgtcgggggaacctggcctggcacccagcacacaccctccacaagcctaaggacacagtggctccatcctgttcccaggctactccatggaaggaaaacccacgtccacagaccagcctccgtccacagtttcaggccccgtctgtggaccccagagccgggaaaggccgcctgcctgcgtaacccttcacagccctgctcaggtgcctactgaggcgaccatgccactctggggggctgcagggaggaaggtgggaaggatgatgggctgagctctggcctggggaggcacggatctggaggctggggggccttccgtgaagtggcagcaggctgggacccacacccaggtccgcaggacggccaaggtccagctccacttgccgagcccaaaaaagcagccagctcctgaccaacctgtgtcaggctgggaacttgcccacgatcgcagcctggcccgccagcatcggacccctctttgcaggctagatccaaaaagctcacggcgcaacttcagcagcccccaagccccggcgcggcggtgttctgatgcagaacgaaaacggccacgtccccatttcgccaggtggcccaggaccccggccagcttgttttctgaggggctgcagctgctactgagcccctcttgtcacccaagcaagactccttctcagagggagtcaggccgatgcctgtcctgcacggctgagacctctgccatctgaggagggcgggagggggacagagcccaagacgcggaggccggtgcctcataggggaggcacgggcgacagacccacaacctgagctcctgaagcaggaagggagtggggacccagcggaggaagaggccggggatggggtggtacgctgctgccggtgactttgccgctaaccctagcgaggtgacctcagctaagtcacattcccctgaggctcaggagcggggaacgcagctgaaaggctacaaggagggagagaggggagtggggagtcgacttccaggacaggggttggtccgagggagacctgcgtcaggctgggttctgggccagcacattgggaggggagagaggcctcggaactgagggtctcaggcggcacagtcaggggtcaaagggcgggaggtgctacctcgcaggccaggaccggactccaagcctgggtaggtggggacctgggaaaggcggtcgccggggacaggatgggccctggagggagctgacagtgaggtttccagagtagagaacagcggcttctagtgcagcgggatccggccttcccgggtggacgtccccgggcgggatggggtcacgagacggtgtccctggccaatcccagggtcagaggtcgcgagggagagccctaatcggtagggccgggtataggcctcagggtgcagggtggcgctcgctgtccccagcggggccaggggtcgcggtcggaggtagcagacttgggggtcgggacagccgctggggtcaagggtcgggggtcggggccgcggtcaccttgagcagcacgaagaactcgaagagacggcggaaggcgggcgggaagagccgcgaataggtgacagccatcttgaagaacagcgcgtggaagagccggtcgcgcacgttgatgagggggttggggttgagattgggggtgcgaggcccgcgcgcgggggccgggccgccgccgccgccgttgggcccgggccccggagctgcgggctccacgtgctccgacatgcctcccagcgtcgcgccctaacgacccgcaagtgtccgagggcgcctcccggccgccatcggccgccctcgcagccgccgctctcctcacggcctcccggccgccgccgccatcttccgctttctcgtccggctgcggcgctgctgacgctagcgagtcgccacgccgggcaagagcggcccccctgcgcccgcagagaacgctgggatgccagcggcgcccgcggaggcctcaccccctacctcggccgctccagggggcgggcctgcatctgggccacctcttttgcatattggcacccacaatccaccgcggctatgaggccagtataaggcggtaaaattacgataagatatgggattttacgtgatcgaagacatcaaagtaagcgtaagcacgaaagttgttctgcaacataccactgtaggaaattatgctaaatatgaaaccgaccataagttatcctaaccaaaagatgatttgattgaagggcttaaaataggtgtgacagtaacccttgagtcgtgctcgcttcggcagcacatatactaaaattggaacgatacagagaagattagcatggcccctgcgcaaggatgacacgcaaattcgtgaagcgttccatatttttgctgtagtctacagctcgtcacctcgtttggcttctcttgcccggatcctgccatgacgtcacagggccagtaacgtcatagtcttcccgtgtccatctcctgtggcgccactaaggttggcggtagaacaatctggcagtctctactcctgcgtggcgctgtgccacctgcccccgtagcttcgcgcagcaatgaataaataagtgctcttcaggggcacttactgagtgccggctgcgtacacaagaggatactatggtttttgggttttttggttgtttgtttgagatggattctcgctctgtcgcccaggctggagcgcagaagcgcgatctcggctctctgcaacccccgcctcccgggttcaagccattctcctgcctcagcctcccaagtagctgggattacaggcatgcgccaccactccaggctaattttatatttttagtagagacggtttctccatgttggtcaggctggtctcgaactcctaactttaggtgatttgcccgcctaggcctcccaaagtgctgggattacaggtgtgacccaccaagcccgccaaaaaaaagttttgtgttgttttttttttttgagacgcagtctcactctgtcgcccaggctggagtgcagtggcgtgatctcggctcactgcaacctccgcctcttgggttcaagcaattctctgcctcagcctcctgaatagctgggattgcaggcttccgccaccacacccggctattttttttgtatttttagtggagaccaggtttgatcatcttggccaggttggtattgaactcctgacctcgtgatccacccgcgtcagcctcccaaagtgctggagttacaggcatgagccaccgcgcccggcccccccaaaaaaatgtttttaaaagttaactgaggacgttggtgcatgcctgtaattccagctacttgggaggctgaggtgggaggactgcttgagcccaggagttggaggctgcagtgagccatgatcgtatccctgcgctccaggttggatgactaagtgagaccctgtctctaaaaaataaagtgtaaaaaagccaacagtcagtatttttagcttttttgggtagagtaactactccactctgctgttgtacagaaaacgcagccgtaaatgatacataaatggatgggcacagctgtgtgccaataaagctttgtctgcagacactggaatttgaatgttatgtaatttccacgtttgatagaatggttttcatattttgggtttttttttcaaccacttaaaaatgtaagagccattcttagctcacaagccatacaaaaataggctgcagctggatttggcccacaggtcaagaacacagctttccaagagaaagataagcaaataacaaacataactttaagtgttctggtagccacagtaaaacaactaaaaaagagcaagtgaaattaattttaataatatattttacacatctcaagttatccaaacaaggtcaggcgcggtggctcatgcctgtaatctcagcacttttggaggctgaggcgggaggatcatttcagcccaggtgttcaagaccagcctgggcaatataatgagatcctgtctctacgaaaaataccaaaaattagctgggcacggtggtgtgtgcctgtggtcccagctacttgggaggctgaggcaagaggattgcttaagccaaggagttggaggctgcagtgagctgtgatggcaccattgcactccagcctgggcaacagagcaagaccccacctcataaacgaaaaaaaagtggccgggcgcggtggctgacacctgtaatcccagcacttgggaggccgaggcgggcggatcacgaggtcaggagatcgagaccaccctggcaaacacggtgaaaccctgtctctactaaaaatacaaaaatattagctgggtgtggtggcgggcgcctgtagtcccagctgctcgggaggctgaggcagaagaatggcctgaacccgggaggcggagcttgcagtgagccgagatcacgccactgcaccccagcctgggtgacagagcgagactacttctcaaaaaaaaaaaaaaaaaaaaagtaactgagatgtaccaagtcttcagaatctggtgtgtttcccatccatggggtgttccaatatggataccagtgcttcctcagaaatacttatctccacagtatttagatttacagcgtttatactgaaaaggaaaattcagaaacgctaaggtatttaaaatatacacgaggctgagcacggtggctcacgcctgcaatcccagcactttgggaggctgaggcgggaggatcacttgaatccagactgggcaacatagggagaccccatctctacaaaaaatttaaaaattagctaggcatatggcacatgcctgtagtcccagatactcaggaggctgaggcaggagattacttgagtccaggaggtcgaggctgcagtgaactatatttgcaccactgcactccagcctgggtgacagagcaagaccctgtttcaaatatctatatatttacatttatatgtataatgtgtacatatgtgtgtatttatgtatttgaaaactttaatgtgtgtgtacatatatatatagtcaaaaacggaaatcatgtcagtttttaatttttaactgaaattaattgaaatagcccggccacggcagctgacacctataatcccagcacttcggaaggctgaggccggcggatcacttgaggtcaggagttcaagaccagcctggccaacatggtgaaacccgcatctctactaaaaatgcaaaaattagccaggcgtggtggtgcgtgtctacggtcccagctactcggagtcccagctacatatatatgtgtatttatatatatgtgtcttcaaaaaatggaatctagtgccagtttttaatttttaattgaaatttaagaataggaagtatttgctgggt[173 bp omitted]ggcaggagaatggcgtgaacccaggaggtggagcttgcagtgagccaagattgcgccactgcactccagcctgggtgacagagcgagactccgtctcaaaaaataataataaaataaaataaaaagaacatgaagtatttgcttccctgatggcaccagccacacttccagtgctcagtagccccatggccagtggctacagtagtagatagtgccacattgaaaatttccttcatctcagaataacagaaatggtcagcactggtctaaaatgacatgggtcggccaggtgcagtggttcaagcctgtaatcacagtactttgggaggctgaggcgggtggatcacctgaggtcaggggttcgagaccagcctggccaacatggtgaaaccccatctctactaaaaataaaataaaataaaataaaataaaataaaataaaataaaataaaataaaatgtgtcaaactcctattgatgcttcaaaaccccatctcccttgcctcctcttacatgcagctttccttgattcctccgacagagccccaactctccctccagttcctccagccccaagcctctcattctgtcctgtacttgctcatatagggaaacagggtgggcggggtgggggggttccgcctgtgctggctcatacagggaatccgggttgggggttggtctgtgccagctctgtcttcctgggcatgggctgggccagagctaaggtctcctgagagccagcactgcctggcaggagactgtcccggagactttttaataatttattattatta[137 bp omitted]gcctcctcagtagctggaattacaggcatgtgcccccatgcccggctaatttttgtatttttagtagagacggagtttcgccatgttagccaagctggtctggaactcctgacctcaagtgatccgcccgcctcggccttccaaagtgctgggattgcaggcgtgagccactcggatttttatttttatttatttatttatttttagagagaggctcttgctctgctgcccaggctggagcgtcatgttgtgatgataactcactgcagcttcgacctcttgggctcaacggatcctcccccttcggcctcagcctcccaagtagctagaactccaggtgcaagctaccgcacccagtaagaatcctattctcttttggactgacaaactcctactcatccaacaaagccccagctccaatggccccttctctgaggaacctgccctggttccctggtccacctcccagctagtagagttccctgggaaggggttagacgcctctaagtggcagagaggggccctcattcctgccccaaaggtagccttctcccctcccctttctggcagaagagaagtctgagatggagaaagagtgagagccgcccacgagctctgagcagagagcccgcaggagtgccacgtcccggcggcctcggcccctccctgcctcagtttcccgtggcatcaaagggggcgaggggcccctccaggcctctggtgacgggggtgctgtgcccaggcgggggtccgggggcgaccgagggggctcaggaagtccgcggccgcaggaattcggcgcctccaggccttataaggacatttgcgctccgggccaatcagcggcgggggcgtggcgcgcggagcccggcgcgtcccaaccccgcgccagcccggcggtcccgtcccgtcccgtcctgtgcggccccgtcccgccgcccgcccgccagccatgagctccacgcagttcaacaagggcccctcgtacgggctgtcggccgaggtcaagaaccgggtgagtgaggggcgccccttgtccccccgacagcgcggccgtcgcacgctccgaccggtgcaggagcccccaggcgcccccggcacctcccgggcagggagcttggagacccggggcggacgggcccttgttctccctgacgcctggtggggggatgtctgcgggcaccccctgaggctcccgcgaatcttggggagcacccaggtctgagatctgggggacgagtgacccattcccccccccaacatctaggggtagttgggtctgacttcgtcccctcgccatggccccaggacccccacgtgtgaagcccctggcgcccactcaaccttcgagaaggtccgttcaaggtccgacaacgctctgggggtctgggggggaccccagcaaccccgtcatctcctggccacacttctgcttttggggcctcttagctttgggaggggaaggggcatggccgagtggtttttgagaagtgttacccccccacaaacaggaatttcctggcctctgggacaccttgggggtgtcttggggggaggggcggtagccgctttgcacggtctttgtctcccatctgactaatttaaacggataacaaagaggttctctgaaggtggccctgagatatgtggggttttgcagcctcgaaagaagagctggggcccggcagggcgcgggggctcacgcccgtaatcccagcactttggggggcggagctgggtggatggcttgagcccagcgagttcgagaccagtctgggcaacatggcgaaaccccatctctataattaaaaacaagccagggctaggggagacactttttaagagagcacttgtggttctagctcagagaggaccagacacttctgcagggtcacacagcagggtcctggacaggattcccagggaaagtggggggcgggggttgtgatgcgagacccacggacaggaccgggacctgaccctccaggaccttccagctggaggggggtgtcgtccccgcccaccccctcccccgacgcccactgggcacctgggaaggtgtccttacagctgacttctgcaggggaaactgcctctgcacgctctgagggcaccggccctgccagccccaacagccacctgcccggcggcactccagggccggcagactggagggagaattcctgcttccccgctgtgagcccctgcaagccttcagaccagctcttggccaaaaagggaggctgaggcttggggtggtcaaggcctgagccagggtccccagcccggggctcacgactcctccttcaaggggccatctgcaccctgcattcatagagccccccgtgcagtggggtgggcaccctgccgcaccctgcatacagccggctaagggcaccggtgtccacagggacccagagacgtcgttccagctgcccagggccacacagcccacaagtgacagggccaagaccggaacccagtacctgctgggcctgcggaagtgggagcgggcacaggagggtggggcggcttccggagacggggtggggtggggtgggggcaggttgatacctgccctggcgggggtgaggacagaggctggaagagccgcttagcaggctccccgcgcaaccctcagtctgtccgtttggagggtgggcgaggcgtcggccagcttgccagggtcacggaagggtcgcctcccaattagaaaccagcttccccctggcttcccgctcacacccgctttaccggctgcttgaaacagccagagacccgccccccgccccgcttccccgtggctcagttgactcccggctggacggcacggaggcagctcggatccacagtgtctgcggccttgcatcccggcttgggggtccggacccgctgggaacagctggttcagatttagccggggaggcagcgcgcattcctggcagtttgtggtgaacaggaatgtgctggaaggccggcggccgggcagcgggggggcgggggtgggggaggacggcagcggctgggggtggggccaggggacctgggcccctgagccggcagagacgcggcgcagctgggcaaggcagggctgtgtacccagcagccaccgttctcattcctcgggatcaaagttgccggcggggcggggctgcccccgggcgtggaaagccaagctgggtgggctgtgagctggtactggggggcctccccgcctttgcctcctctgggctacgagctgtttccaggcaggtgccaggtcaggggaccctaacccaaataatcccaggcaggtccaggtcaggggaccctatcccaaataatcccaggcaggtccagctcaggggaccctaacccaaatcatcccaggcaggtccagctcaggggaccctaacccaaatcatcccaggcaggtccagctcaggggaccctaacccaaatcatcccaggcaggtccagctcaggggaccctacccaaatcattccaggcagatctagctcaggggaccctaacccaaatcatcccaggcaggtccagctcaggggaccctaacccaaatcatcccaggcaggtccagctcaggggaccctaacccaaatcatcccaggcaggtccaggtcaggggaccctacccaaatcatcccaggcaggtctagctcaggggaccctaacccaaatcatcccaggcaggtccagctcaggggaccctaacccaaatcatcccaggcaggtccagctcaggggaccctaacccaaatcatcctaggcaggtccagctcaggggaccctaacccaaatcatcccaggcaggtccagctcaggggaccctaacccaaatcatcccaggcaggtccaggtcaggggaccctaacccaaataatcccaggaagagatgaggaagcggaggctgagtggggagctgtccgcgggaacctggggagatgggtgcagagcagggagagggatttgattttttttttccttctctcttttctttctttttttttttaagacagaggctcactctgttccaggctggagtgaagtggcccgatcttggctcactgcctcctctgcctcctgggttcaagcgattctcctgcctcagcctcccaagtagctgggactacaggtgcccaccaccacgcccagctcatttttgtattttagtacagacgggatttcaccatgtgggctaggccagtctcgaactcctgacctcagatgatccgcccgccttggcctcccaaagtgctgggattgtaggtgtgagccaccgcacccagcccaaaccctactttattctccctccagcgtttatctcccgctcccgctacacgacctgcccccatgcttatggccccctatacactttgccgtctgcctcagtgctgtctccgcggtcactagtggctggatagggacactcgaggtccccactggtgcacacccactgcccaggagcacacagcccattccccacggcggtgtctcagagcaccgaaggccaagaaagctggaatggccgggtgcagaaaggtggcagggaatcggtggcaaggagccaggtgcgtgactagaggcggtcagcctcgggggcagctccttcgggagttgctaagaagcaggatgggggccgggcgcggtggctcacacctgtaatcccagcactttggagggctgagacgggcagatcacgaggtcaggagatggagaccatcttggctaacacggtgaaaccccgtctctattaaaaatacaaaaaatgagctgggcctggtggcgggcgcctgcagtcccagctactcgggaggctgaggcaggagaatggcctgaaccggggaggcggagcttgcagtgagccgagatcgcaccactgcactccagcctgggcgacagagtgagactctgtctcaaaaaaaataaaaaagaaaaaagagctgatggttgcacaacattgcagacgtacgaaatgctgtgaaatggtgcggtttcaggtggttgaagtggtaaacgtcaggtgtgatatagcggggaggtgagaaggcagggcggggaggcagatccggccaggtttgtcctgcaccgggagtggattagagctgatgtttatcagtgagttctaagccggttgtcggcctgcttggagggcggtttatctgtgcccgcctgcagtggctggggcgcccccaatgatgggaaaagggagcatctgcgtgggtgtggtgaggggggacctccaggccgctctatctgctgttgccctggagtccccggccccaccctctgcagagcttctgtggggttcctgctgggggtgcccccagcccagctcagtctcgtgccctttgctccaccagctcctgtccaaatatgacccccagaaggaggcagagctccgcacctggatcgagggactcaccggcctctccatcggccccgacttccagaagggcctgaaggatggaactatcttatgcacgtgagtacacgcagggacacaggctgtctcacacttaacaaatcttggtttttctcactttttttcttaattaagaaatttttggggggccgggcatggcctggctcatgcctgtaatcccagcacttttggaggccgagggtggtggcggggggcggtggatctcgaggtcaggagttcgagaccagcctggccaacatggtgaaaccccgtctgtactaataatacaaaaaaattagccaggcacctgtaatcccagctactcaggaggctgaggaaggagaattgcttgaacccgggaggcggaggttgcagtgagccgagatcacaccattgcactccagccggggtgacacagcgagactccatctcaaaaaaaaaaaaaaaaaaaaaaaaaagttagctgggcgtggtggctaaataaataattttttttttttgaggtggagtctcactctgttgcccaagctggagtgcagtggcatgatctcggctcactgcaacctccacctcctgggttcaagtgattcccctgcctcagcctcccgagtagctgggattacaggcgactgccaccatgcccggctaattttttttgtatatttagtagagatggggttgctccatgttggccaggctggtcttgagcccttgacgtcacgtgatctgcctgcctcggccttccaaagtgctgggcttacaggcctgagccaccaaacccagccaaagattactttataagagtggaaacttgaggcctgggatggtggctcacgcttgtaatcccagcactttgggaggttgaggtggacggatcacgaggtcaggagatcgagaccagcctggacaacatggtgaaactccatctctactaaaaatgcaaaaattagccgggtgtggtggcaggcacctgtaatcccagctactcgggaggctcagggctgaggcaggagaatcacttgaacccgggaggtggaggtggcagtgagtctagatagtgccattgcactctagtctgggtgacagagctagacgccgtctcaaaaaaaaaaaaaaaaagagtggaaactgaggcccagagagaggccgtgagtttgcccaggaaggcgtgagcttggctgagatcagcatcgggtcttcacggttcctcgctgctcacagaggtttctgtttcccccgccccatgttgtgccctccagactcatgaacaagctacagccgggctccgtccccaagatcaaccgctccatgcagaactggcaccaggtgaggggctggtggagcggagcagggatggtgctgggggcccatctaacaggtggggagactgaggcccactcactgtccctctcctgcctcttcccagctagaaaacctgtccaacttcatcaaggccatggtcagctacggcatgaaccctgtggacctgttcgaggccaacgacctgtttgagagtgggaacatgacgcaggtgcaggtgtctcttctcgccctggcggggaaggtgaggcccagagaggggcagccacctgcccagagtcacacagcgaggtggatgtagctgctgcattcactcgtttgcaaatttctgtttgtttatttttgagtcggagtctcactctgtcactcaggctggagtgcaatggcgtgatctcagctcactgcaacctccaactcccaggttcaagcgattcttctgcctcagtctcccgagtagctgggattacaggcacctgccaccacgcctggctaatttttgtatttttagtggagactgggtttcaccatgctggccaggctggtcttgaactcttgacttcaggtgatccgcccgcctcggcctccccaagtgctgggattacaggcatgagcccctgtgcccggcctcgtttacaaatatttctgagcatccgtgaggtgccaggtacttcagattccttggtgaacaggaaggacatggtctaccccttatgcagttcagtctgatggcggaggcatgcaaaagtgaacacag[131 bp omitted]tgaaaccccatctctactaagaaaacaaaaattacctgggcgtggtggtgcatgcctgtaatcccagctactcgggaggctgagcccaggagttaagaggttgcagtgagctatgaccacaccactgctctccagcctgggcaacagagcaagactctctcaaaaaataatcataacaaaagtaataaataagctctgaactgggagaaatgccttgaaggagaagaatcagacgaatgttgagtgtctagtgatcttcaaacccagaccgggagcgtgggtgggacagtggtgtagaccgggagcgtgggtgggacagtgtctggtgtagaccgggagcgtgggtgggacacggtgtctggtgtagaccgggagcgtgggtgggacacggtgtctggtgtagacggggagcgtgggtgggacggtgtctggtgtagaccgggagcgtgggtgggacacggtgtctggtgtagacggggagcgtgggtgggacggtgtctggtgtagaccggcagcgtgggtgggacacggtgtctggtgtagaccgggagcgtgggtgggacggtgtctggtgtagaccgggagcgtgggtgggacacggtgtctggtgtagacggggagcgtgggtgggacggtgtctggtgtagaccggcagcgtgggtgggacacggtgtctggtgtagacggggagcgtgggtgggacggtgtctggtgtagaccgggagcgtgggtgggacacggtgtctggtgtagaccgggagcgtgggtgggacggtgtctggtgtagaccgggagcgtgggtgggacacattgtctggtgtagaccgggagcgtgggtgggacggtgtctggtgtagaccgggagcgtgggtgggacacggtgtctggtgtagacggtaagcgtgggtgggacacggtgtctggtgtagaccgggagcgtgggtgggacggtgtctggtgtagaccgggagcgtgggtgggacacggtgtctggtgtagaccgggagcgtgggtgggacacggtgtctggtgtagaccgggagcgtgggtgggacggtgtctggtgtagaccgggagcgtgggtgggacacggtgtctggtgtagacggggagcgtgggtgggacggtgtctggtgtagaccggcagcgtgggtgggacacggtgtctggtgtagaccgggagcgtgggtgggacggtgtctggtgtagaccggcagcgtgggtgggacacggtgtctggtgtagacggggagcgtgggtgggacggtgtctggtgtagaccggcagcgtgggtgggacacggtgtctggtgtagacggggagcgtgggtgggacggtgtctggtgtagaccgggagcgtgggtgggacacggtgtctggtgtagaccgggagcgtgggtgggacggtgtctggtgtagaccgggagcgtgggtgggacacattgtctggtgtagaccgggagcgtgggtgggacggtgtctggtgtagaccgggagcatgggtgggacacggtgtctggtgtagacggtaagcgtgggtgggacacggtgtctggtgtagaccgggagcgtgggtgggacggtgtctggtgtagaccgggagcgtgggtgggacacggtgtctggtgtagaccgggagcgtgggtgggacggtgtctggtgtagaccgggagcgtgggtgggacacggtgtctggtgtagaccgggagcgtgggtgggacggtgtctggtgtataccgggagcgtgggtgggacacggtgtctggtgtagacggggagcgtgggtgggacacggtgtctggtgtagacggggagcgtgggtgggacggtgtctggtgtagacggggagcgtgggtgggacacggtgtctggtgtagaccgggagcgtgggtgggacacggtgtctggtgtagaatggaatgggagtgtgtgtttgtgacatggtgtctcacgtagaaggaacagcaaggtcttgacattggaattggctgggctgttagaggaagcgggagctggttttctcctggggtaactgctccaaatggtgttttcagatgccccctgtggctcccagtaacctcacgtggggaatggtggtcagggaggagccgggcgcagacatcccagtgaggggcagagccaatggcctggccatggtgcccggggattgggtcagaggaggtggtggaaggtgagagagaggaagcgaaaaccacgtccccatccccagaattcttggcctgagccctggaaagctgagc[224 bp omitted]gaggcaggagaattgcttgaacctgggaggagggggttgcagtgagcggagatcacaccactgcactccagcctgggtgacagagccagactccatctcaaaaataaaaataaaaaactgaaacagctgtatgatgggtgtgtggagtgtgtggagtcccagacacccgagagatgtgcctgtgggggctctgcgcggcaggcagaggtgacaggccgcggcctggtctctgtcccgcccccagggcctagatctagggtccctggctgccctctgctggtactcccggcccctttccctcacccaggccaagactaaggggctgcagagcggggtggacattggcgtcaagtactcggagaagcaggagcggaatttcgacgatgccaccatgaaggctggccagtgcgtcatcgggctgcaggtgggcgacagctcccccagccccagggaccacggcattgggggaccacggtgttgggggacagcagcattgggggacagcggcatggagccctgtggtccctcaatttcagggagggaccggaagcttgttgggtgcagtctgacctctcccacgaacctccctgcagatgggcaccaacaaatgcgccagccagtcgggcatgactgcctacggcacgagaaggcatctctatgaccccaagaaccatatcctgccccccatggaccactcgaccatcagcctccagatgggcacgaacaagtgtgccagccaggtggggctcgcccgggtgcccccgactcctctccctgcccctctacaccctgtggtctcggcccctccctggggccacctccagcttctctccccactctcagtctcagccccttccctagaccacctccggcttccctccccgctctctgtctccgccttggatttcagcctctgtcatttccacctggctgtgggtctctagggaagttactacctcaccctgtgtcattttcccttaaggactgcccaaaggtccacccaattctttttttttaatctttatttattttatttatgtatttattttgagataggatctcactctgttgtccaggctggagtgcagtggcacgatctcggctcactgcaacctctgcctcccgggttcaagagattctccttcctgcctcagcctcccgagtagctgggactacaggtgcatgctgccacacccggccaatttttgtatttttagtagacatggggtttcaccatgttgcccaggctggtctcgaactcctgagctcaggcaatccacccgccttgacctcccaa[132 bp omitted]ctcagcctcccgagtagctgagactacaggcgcccgccaccacgcccggctaatttttgtatttttagtagatatggggtttcaccgtgttggccaggctggtcttgaacttctgacctcaggtgatcctcccacctcagcctcccgagtagctgggattacaggcatgtgccaccacgcccagctaattttgtatttttgggagagacagggtttcaccgt[136 bp omitted]ctccttcctctccaggtgggcatgacggctcccgggacccggcggcacatctatgataccaagctgggaaccgacaagtgtgacaactcctccatgtccctgcagatgggctacacgcagggcgccaaccagagcggccaggtcttcggcctgggccggcagatatatgaccccaagtactgcccgcaaggcacagtggccgatggggctccctcgggcaccggcgactgcccggacccgggggaggtccctgaatatcccccttactaccaggaggaggccggctactgaggctcccagcacgctctctccccacatcgtctgcccatctgggtttttgggtttttctgtgttttcatcttttttttttttttcttaacccgttcagtgctgccagtcaaccaagggtctgtgagtgtcagcgtgggatcaggcagcagagcttttttcccctttgccttgatccttcgcaaggctgagccactgggctgtgggggaaggggtcaaggccatatcccaatacgtgtagggcgagggtccctgctggcacattcaggctgtgctgggaagaagagacctgggcttggaaggaaccggtccccgacggtttctgcttgcctcgcctcttcccccttttgtcagctgagcagtttgtggtttctatgcccgcaagtttcaggaagtattcacaaaagaaaaatacattttttcccccaggggtggggcaaggacagtggagagagtgctaggaaatgagtcccctgggaaaggggaccgggccgtgatgttaaatatctccggctcccaagtgactggatttgcctaggaccttcagaccaacagacttcagaccctcagacctgccccggggccaggtggagaaagtgagggccgtacaaggaagtgaaattctgagttgttggggctaagcctgaccccctctccatgctccccgccccaacccactctggcctcagtagatttttttttcagttgtggttgttgcccaggctggagtgcagtggcgccatcttggctcactgcacctccaccttccgggctcaagcgattctccagcctcagcctcctgagtagctaggactgcaggtgctccaccacgcccggctaatttttgtatttttagtagagatggggtttccccatgttggccaggctggtctcgaactcctggcctcaggtgtgatccgcccgcctccgcctccccaagcgctgagattacaggtgtgagccaccgtgcccagcccctcagtaggttttaaggagcccccagccctcctcccttctgggcccgaccagcttatactgctccatcttccccggccacatgccccgccaagtactgcacagggaccccccacccaggggacctgctccgtgagataatgtgaaatacgactgtggaccaaacgcaataaaacctctgtttgtacgaagagaaggtggccaagagagttggcgtcgatgagggcgtgctttgctttgatgcttttgtggggagagaggaggtcttgggggatggggggatcaaggggaaaatgtccacctcaccattgggaggaggagcaaaagctgaagccacaggtgagtctgggtggaatgaatgatttgaagggccgggacttggggtagagggagaggctgggcttcctggccatttggagaagaggcagttccctcaaatgccccccatgcgctttggctgcactctaccttacagcgcaagtctcgtggcctcagcctggatgtctccccgttggcgaactcctatttatcctcaaagccccaacggcaatgccacctcctgccgcgggagccgtccccacgcctctcactctccccagcgccttcaaagctgtggacccacacgctcccatttcagcttcacctccagcctgaagagtttatttcaactcttcttccagagtgggaaacgggttttcctcaaaatcagggtagccactataatcggagactctagaatgttggccccctccccctcctgccatcctctgcagaagccgaggagcgttcgtggaatgaatgaatgaacgaatgatctagtggaacccctactttacagacggacgagtgtagtcccagagtctggactaaactagagggagcctggccagccccggggacagcggggacagagggaactcctgcaattcggagctgcggtattgcagccggttatacaacgtggggaggcagcctggctccccaaagacagcgcagcctcgttcccggagggcggcctgcctgggacctgccgggcactccgccaccctacggtgatgcagcaagagccgcgcggtccctttaagaaacccggctaggcgaggcccttctgtgatcccgtctcctcccttggcccgcgcagctccgacggagcaggccagtgagtgacgggcaggtcgcccaatagcagcgtgcagaggcaggggcgtgccccggcgctgctacctgcgcgggcaagctcagcgcacttggcttaaggggcggcgcgctccctgcctgctgctgggcggagggaaggcggcaagagctgcggagcccctggaaggtgagaaggactcggagagggaagaaggcccgagactcgagaatgcggggttggggccgggagggatgcaagttccctgggaattagggggtccagcctctgacctccttccggtgaatgttgacgacggctgaattgatcactgattctcaaggggggcatcggacatctgggacccttaagagggcctttgccgatcacacacctgcagccccctgcccgttagaactcctgcactcccccttgccccgtcttacaaatggagaaactgagcccactcccccagatcctaagtcccgcttgatgtaaaggaaagaaccctggcgtaagggtctgggtctgaggtcccagttccggcctggtcacctttagcaacttcctgcccctctgtcagcgtcagattctccatctgtgtcagaggtggaccggcccaaggaaaatagatcaggaatcgctgactccaggagtctctatcccagccccttcgcctgactctttctctggctcccgcggtccctctgagcgattaatgctacataaggtgtgggcagagctggggtcgtgcctccagctgggcaactgcctgtctctctgggtgcctgggtttgctttcttgggcctcggtttccacttctgtagagtggggtgatagtccagcacttcccctgggcgtgtgaaatgtccagcactgccaatattcgttgctgttatcttcggagaacagtgaggggaaaggaatccttgcctgggctgggccaggcaggaggctgggggtcaggacctggaagaggcttccaggtgaggcttggggtggagcctggtgacgaaagcgttaagcccaaactcggtccctggaggattagaggatgatctttaagtccccagctgtcagccctgctcagagcgacagtcctggcagccaatcagatgcgaggacggctgcgggttgcgctcccattggtttactccacccctggggtagcggagcctctttatcgagtgactactgtttgcctcgctctaatcagagcttccaggaaccctgcgctgtgggataaaggaatgaggttcagaaaggggcagggagttgcccgcagccgcaccgcacgtcttcagcccgaccgttgtcctgacctctctgtcccgtcccctgcccagtctcaccatggccttctggacacagctgatgctgctgctctggaagaatttcatgtatcgccggagacagccggtaacgccccagtgtgagaccagggccgggtgggcaggcagcccccactgtcccccaccgtctcccacctattctcccccaggtccagctcctggtcgaattgctgtggcctctcttcctcttcttcatcctggtggctgttcgccactcccacccgcccctggagcaccatgaatgtgagcccccccagggaccaggcactttgtgtgtgtaggggaaggcagatggctcacccgtgcacaggaatcccccgtgcatgtcagggagccttcaccaggccgccaatacatggcatgggagtgagctctccatcgctggaggcatgcaagcggtgccgggcgacccgatgggggtggagtcaggcagagtccacagggcctcagcaccaggcgtctccccgcaggccacttcccaaacaagccactgccatcggcgggcaccgtgccctggctccagggtctcatctgtaatgtgaacaacacctgctttccgcagctgacaccgggcgaggagcccgggcgcctgagcaacttcaacgactccctgtgagccagaggcagtgggtgcggccggcctgcaaactcggggctgcagtgccggccggaaccccgcctcctgccctctctctgtccccagggtctcccggctgctagccgatgcccgcactgtgctgggaggggccagtgcccacaggacgctggctggcctagggaagctgatcgccacgctgagggctgcacgcagcacgggtgaggaggccggggggcctctggcagggctgagctctgagcctcaacttgccgggccgtgaaatgggcacagggtgggggtgggtgcctcagaccaacgtccccccagccccatgctcccgtgcgctcctcccccagcccagcctcaaccaaccaagcagtctccactggaaccacccatgctggatgtcgcggagctgctgacgtcactgctgcgcacggtagggtgtcggggcgggaccgcgctgacttcctgggacactgcactggggatgtcctggcactgccccaccccgggccaaggacctcccgttccaggcatccaggctgtccctggtctctgcggtgatgctgcttgtccgtctgggcccccagacagagtgtgtctgacccagtgaggaagactcgtctgtgagatctccaatgagtccctttgcctctcagagcctcagtttccctatttgtaaagtgggggctatgatagtatggtctgcctgggaactggccagagcgctggacccctagtgagtgttcaaaatcattgtcccccttgtggtctttctccccaggaatccctggggttggcactgggccaagcccaggagcccttgcacagcttgttggaggccgctgaggacctggcccaggaggtacgaggccccactcatcctcaacccccatggaggcaacgttggcaggcagcctgcgccgggagggtctggggcagcccgggcacttcccttgggtgggttttcaggaggattagacagcgagagggagaggctgcccctggcccagtgccctgccctggttagggcttggaggtgggatcattgccagctccgtctggtaacctctctctagctcctggcgctgcgcagcctggtggagcttcgggcactgctgcagagaccccgagggaccagcggccccctggagttgctgtcagaggccctctgcagtgtcaggggacctagcagcacagtgggcccctccctcaactggtacgaggctagtgacctgatggagctggtggggcaggagccagaatccgccctgccagacagcagcctgagtgagtgactgacctcggtttcccctcttgggaagtggaactctgggcaggggggcagggcctcatggcacccccatcccaggccccgcctgctcggagctgattggagccctggacagccacccgctgtcccgcctgctctggagacgcctgaagcctctgatcctcgggaagctactctttgcaccagatacaccttttacccggaagctcatggcccaggtgggggcagcctggatgctggggtgggagggtggtggccagagcccatccagtaccctcagtccaggtgggccagggccaggccggagggtcacggaaactatttgaagaagtaggagttagccgatggagggggatcagcttgtgcggaggatcagaggcacacgcaggagcaaggcagagggggcagggggtgggcaggggtcctcagaggaggagagggtcatcagtggagggggtgctgtccacaggtgaaccggaccttcgaggagctcaccctgctgagggatgtccgggaggtgtgggagatgctgggaccccggatcttcaccttcatgaacgacagttccaatgtggccatgctgcaggtgtgcgggggtgctggggaggtgggatgtggctccccggtgaggagggtagacaggcccggtggatgggaaggtgggctccgtgcagacccccacttttttttttttttttttgagatggagtctcgctctgtcgcccaagctggaatgcagtggcgtgatctcgactcactgcaacctccacctcccgggttcaagcgattctcctgtctcaccctctgagtagctgggactacaggcgcccaccaccacg[179 bp omitted]gtctcactctgttgcccaggctggactgcagtggcgagatcttggctcactgcaacctccgcctcctggattcaagcaattctcctgcttcagcctcacaagtaactgggattacaggcatgcgccaccactcccggctactttttgtatttttagtagagatgggctttcaccatgttggccaggctggtctcgaactcctgacctcaggtgatccacccgcctcgcctcccaaagtgctgggattacaggcatgagccactgtgcccgacccagactctcactttcacctgcgccccccagcggctcctgcagatgcaggatgaaggaagaaggcagcccagacctggaggccgggaccacatggaggccctgcgatcctttctggaccctgggagcggtggctacagctggcaggacgcacacgctgatgtggggcacctggtgggcacgctgggccgagtgacggaggtgagggcctgtccacctgcggggtctgtttcagtggggagggcaggtcccatcctagtgttcccaccctggtgttcccagggggaggcgggcccggccctagtaagagcctgggatttgtagagatctcaggagggagccggccgtgggcctacgaggggaaaacatggcccagccccgaggtccagggggaggagcggagtggtctaggaggcaggcggaccccagcgcctaggactcacccccgcatcccacagtgcctgtccttggacaagctggaggcggcaccctcagaggcagccctggtgtcgcgggccctgcaactgctcgcggaacatcgattctgggccggcgtcgtcttcttgggacctgaggactcttcagaccccacagagcacccaaccccagacctgggccccggccacgtgcgcatcaaaatccgcatggacattgacgtggtcacgaggaccaataagatcagggacaggtcaggcgagggagggggcggggggatgagggactgggcggggccaagagcgtggtgggtggggccaggcagcattcagcctattggagaccatgatagacaggatctgggctgtatcaacagtggtatggtagccagagcccggggctccttagaccaataggggcccgtgatgggcggggcctaggtgcatgaggggcgtggccatgggcctgagataagatgagagcaggtataggttgagggcaatggtgggcggagccaggtgtattattaggtccctggaataagggtggagctaaaattgcaccgggtgctgagcgcagtagatcttgcctgttatctcagaactttgggaggccaaagtgggagaatctcttgaggacaggtattcgagactagcctgggcaacatagtgagaccgcctcccccccgcccccctccccca[136 bp omitted]cggtgaaaccctgcctctactaaaaaaaaaaagtacaaaaaattagccgggcgtggtagcacgcgcctgtaggcccagctacccaggaggctgaggcaggagaatcgcttgaacccaggaggcggaggttgcagtgagccgagatggcgccactgcactccagcctgggcgatagagcgagactccgtctcaaacaaatgaataaatgaataaaattagccaggcgacttgggaggccgagctggggggatcgtttgatcccgggaggtcaaggctgcagtgagctatgattgcagctcttcactccagcctgggcgacagagcaagaccctgtctaagaaaaaggttattcagggtggggccccgggagtttctagcccttccctacaaccggccaccatgcccctctcgcaggttttgggaccctggcccagccgcggaccccctgaccgacctgcgctacgtgtggggcggcttcgtgtacctgcaagacctggtggagcgtgcagccgtccgcgtgctcagcggcgccaacccccgggccggcctctacctgcagcagatgccctatccgtgctatgtggacgacgtgtgagctctggcacccctccccgctcttccccgcggcgggaaggtcccgggtgtgggggtgggcccaggctctgttgggaaccttcctgcggtccaggctgcgaactttgcacctttacaccactccacgtgacctgctgcagcgggaggagcaggggactctgagggtctggtggggggggggactctgagggtctgggggcccccggcgcagggacagcctgggctgcactgatgcctgagagccaaaggctggctggatcaggttccaaggaacagggaggcaaatcttcccgccttgagatcccgggacacgaaccagtcgtgccagatggtgggcggagggggggtctgcggagggtctccagcctccaccccagccgtccccaccccaggttcctgcgtgtgctgagccggtcgctgccgctcttcctgacgctggcctggatctactccgtgacactgacagtgaaggccgtggtgcgggagaaggagacgcggctgcgggacaccatgcgcgccatggggctcagccgcgcggtgctctggctaggctggttcctcagctgcctcgggcccttcctgctcagcgccgcactgctggttctggtgctcaaggtgggcgcgcctcggcctgcccggctgcagaatgggtgcgctggagggtgacagacaggggcggccccacgtgggtgcgcgcccccaggccaatccaggagctgcaccctaagctcccgttgcctctcacagctgggagacatcctcccctacagccacccgggcgtggtcttcctgttcttggcagccttcgcggtggccacggtgacccagagcttcctgctcagcgccttcttctcccgcgccaacctggctgcggcctgcggcggcctggcctacttctccctctacctgccctacgtgctgtgtgtggcttggcgggaccggctgcccgcgggtggccgcgtggccgcggtgagagccgggtcgggcgtggatgggggacgccccccgcttcggccgctcactgaccgcccgcttttccgcagagcctgctgtcgcccgtggccttcggcttcggctgcgagagcctggctctgctggaggagcagggcgagggcgcgcagtggcacaacgtgggcacccggcctacggcagacgtcttcagcctggcccaggtctctggccttctgctgctggacgcggcgctctacggcctcgccacctggtacctggaagctgtgtgcccaggtgggccgtagggggcggggctccgggccgggtcgcacctgctttgcgggaggctgagctaggggtgtggcctccaggccgtttgggggtggggggtggcttattcccttggagagaaggcggggcttcttggcacacgcatgcaggtggctgcattggaggggcggggcctgaggcaggtgggcggggtttctgggccgcctcatacctggacgccctgattccaggtgtatggccagaagctggcacagtcgccgggcgctgtggctcacgcttgtaatcccagcactttgggaggccaaggcaggagaatcgcttgagcccaggagtttgagaccaggctgggcaatatagtgagacctcatcaatacaaaaagttagctgggcgtggtggcacgctgggcgtggtggcacgctcctgtagtcccagctactcgggaggatggggtgggaggatcactcgagcccaggaggttgaggctgctgtgagccgtgatcccaccagcctgggcaaca[151 bp omitted]accccgtctctactaaaaatacaaaattagctgggtgtggtggcgggtgcctgtttcctagctacttggaaggcagaggcaggagaaatgcttgaatcccggaggcggaggttgcggtgagtcgagatcgcgccactgcactccagcctgggcaacaagagtgaaactcagtctcaaaaaaaaaaaaacaaaaaaaaaaaaaacaaggccgggcacggtggctcacgcctgctttcccagcactttgggaggccgaggtgggcagatcacgaggtcaggagatggagaccatcctggctaacacggtgaaaccccgtctctcccaaaaatacaaaaaattatccaggcatggtggcgggcgcctgtagtcccagctactcaggaggctgaggcaggagaatgacgtgaactggggaggcggagcttgcagcgagtcaaaatcgtgccactgcactccagcctgggcaacagagcaagactccgtctcaaaaaaaaaaaaaaacaaaaccccaaaaaaagcctggtacactcctggggggtgggctaagcaataacccgcgcccctccccgcaggccagtacgggatccctgaaccatggaattttccttttcggaggagctactggtgcggacctcggccccccaagagtccagccccttgccccaccccgctggacccaaagggtgaggcactacgaggcttaatagctggttgtccacatatgcccagttcccccccaaaacgagattccacagatgccaatgacaatgacctggacaccccaaccctcacacctgccctgaagacactgcggtccccaagctcccgcagcttttataggccccggcccagcaggtcccggattccacagcccagctctgagggacttgcaggccccaggacccccatgacctccatggctgagtccaccccatctctgcagtgctggtagaagaggcaccgcccggcctgagtcctggcgtctccgttcgcagcctggagaagcgctttcctggaagcccgcagccagccctgcgggggctcagcctggacttctaccagggccacatcaccgccttcctgggccacaacggggccggcaagaccaccaccctgtgagcccccaaccactccctccccgtgagcccccccactcccaccccgtgagcccccccaccactccctccccgtgagccccccaccactccctccccgtgaaccccccaccactccctccccgtgagcccccccaccactccctccccgtgagccccccaccactccctccccgtgaaccccccaccactccctccccgtgagcccccccaccactccctccccgtgaaccccccaccactccctccccgtgagcccccccaccactccctccccgtgaggccccccaccactccctccccgtgaaccccccaccactccctccccgtgagcccccccaccactccctccccgtgaaccccccaccactccctccccgtgagcccccccaccactccctccctgtgagccccccgaccgctccctccccgtgagcccccccaccactccctccctgtgagcccccccaccactccctccctgtgagttcccccaccactccctccctgtgagtcccccaccactccctccctgtgagccgcccaaaccactccctccctgtgagccccccaccacttcctccctgtgagctccctgtgaggcccccgaccagtccctccctgtgagcagtaatggcgccactgcactccagcttgggcaacggagtaagaccctgtctcaaaataaatagggcgggagtggtggctcacgcctgtaatcccagcacttgggcaagccgaggtgggaggattgcctgaggtcagagtttgagacacagcctggccaatatggcaaaaccatctctactaaaaatacaaaaattagccgggtgtgatggtggcgtgcacctgtaatcccagctactcaggaggctgaggcaggagaactgcttgaaccctggaggcggaggttgcagtgagccgagactgtgccgttgcactccagcctgggcaacagagtgagactctgtcacaaaaaaataaaaataaacaaataaataaaaataaggctatcacagggttttggatgtagcatttaataggtg[133 bp omitted]aaaatgcaaaaaaattagccggacatggtggcgggcgcctgtagtcccagctactcgggaggctgaggcaggagaatggcgtgaacccgggaggtggagcttgcagtgagccgagatcgtgccgctgcactccagcctgggcaacagagtgaaactccgtctcaaaaataataataataataataataataataataataataaataattaaaaattttttaaaaacagaaattaaaaatagaagctctgtaactgccagtgcactctgtgaagggggctactctgagacccctctatccacaggtccatcttgagtggcctcttcccacccagtggtggctctgccttcatcctgggccacgacgtccgctccagcatggccgccatccggccccacctgggcgtctgtcctcagtacaacgtgctgtttgacatgtgcgtctcggcaggcccagagtgcagcggtgggaagggactggacgccctctgggactctgcctgccatgtgggtcactctgctctgtgcactggccgcaggctgaccgtggacgagcacgtctggttctatgggcggctgaagggtctgagtgccgctgtagtgggccccgagcaggaccgtctgctgcaggatgtggggctggtctccaagcagagtgtgcagactcgccacctctctggtgagcccatccccaagggaggtcacctcacagggaggggcctggggattcatcctgaaggcagggggaagccgggtactgaggtccacgtgggtaggcaaccttgcccaaggctgggtgtgacacactgaggtcccttccccatctctaccaggtgggatgcaacggaagctgtccgtggccattgcctttgtgggcggctcccaagttgttatcctggacgagcctacggctggcgtggatcctgcttcccgccgcggtatttgggagctgctgctcaaataccgagaaggtaagagctggggattctgctcgaggggccagaaaaggcttctgacaaggaagtgctggggatggggttttgaggaatgagtaggagtttgctacatgtggaccccacttgttgctatggcatttaggggctactgctcaaataccgagacagtaagagttggggatagacagaggttcccctggattctgcctgaagggccagaaaaggtttccaacaaggaggttctggggatgaggttttgagggatgaataggagtttgcttcatggggcagacaactcctggcagaggccccagctcgggcaaagacgcggcggcctgatggtagttgtgggttggtcccccgtgcctaggtcgcacgctgatcctctccacccaccacctggatgaggcagagctgctgggagaccgtgtggccgtggtggcaggtggccgcttgtgctgctgtggctccccactcttcctgcgccgtcacctgggctccggctactacctgacgctggtgaaggcccgcctgcccctgaccaccaatgagaaggtggggaccggccttctcctgacccctgacccccgggactctgttcagccctgaaggccaagccacttggtgcctctctgcccgcaggctgacactgacatggagggcagtgtggacaccaggcaggaaaagaagaatggcagccagggcagcagagtcggtgagggccggggtgggagacccaaggcgggtgggcagtggggtggctgtgccttaacttgaggaggaggagggggagggggaagaggaggaggagggggaggaagcggcagaggaggttgaggcggaggaggagggggaggaggagggggaggagtaagaggtggaaggggaggcgaaggggaggagtaggagggagaggaggagggggagggagaggaggagggggaggagaaggggggaggaggaggggaagggagaggaggagggggagaagaaggggaggagtaggaggggagcagaaggggaggaataggagggggaggaggagggggagggaaagggggaggagaagggggagaagtaggaggaagaggagggggaggagaagggggaggagtaggagggagaggaggaggagggagaggagggggaggagaaggagaggaggaggagagcacttgagaacctgagatgatgcccccatccctgggctgagccggaaccatgagactaacttgaacactgaccccacctttaacccaaccagggctgagcccagagacaaacctacccctgacctccaacactaggtccagcactgccctcaagatctctttttgtttgtttctgagtcttgctctgtcgcccaggctgtagtgcagtggtgtgatctcagctcactgcaacctctgcctcctgggttcaagcatttctcctccctcagcctctcgagtaactgggattacaggtgggttccaccatgcctggctaatttttgcatttttggtagaaatggggtttcaccatgttggtcaggctggtctcaaactcctgacctcaggtgatctgcctgcttcaaccctcaaagtgctgggattacaggcgtgagccactgcgcccggccgcacctggcctacgttcttaaccctgatctctgtctgccgggacagtcccctcacaggtcaccaatgcctcttccccagggagactggggtggggcgtgagccggggctccctgaagcacccctttgtccacacaggcactcctcagctgctggccctggtacagcactgggtgcccggggcacggctggtggaggagctgccacacgagctggtgctggtgctgccctacacgggtgcccatgacggcagcttcgccacactcttccgagagctagacacgcggctggcggagctgaggctcactggctacgggatctccgacaccagcctcgaggaggtgtgaggcctgggtggtggtgaggtggggccaggaggagggcttcctggaggaggtggtgttttgaaggatgaatagcgtgtttatgagcagcaaggacattcagggaggaggcatggcacatgaggagctctggtggctcagatgtcccttgggaaggcctgggggacccatggtgtaggaggggtggggggctcacaagcccccagttctccctgtcggtgtccagtctctgagcccctgcttgtctccccagatcttcctgaaggtggtggaggagtgtgctgcggacacagatatggagggtgcggccacagctccctgacccctgaccccagtccagagtgggaccagaggccaggtccccatccctggcttagtgtggcccaaggcatagcctttaccctatacctgattcctgatcccccaatccgtgaccctcaactttgaccctgacccctgatggccctgcagatggcagctgcgggcagcacctatgcacaggcattgctggcctagacgtaaccctacggctcaagatgccgccacaggagacagcgctggagaacggggaaccaggtaagtccttcccagtggccctggggtcctcccagccacccccccacagcagcgtgagcactgaccctctcatccctcacagctgggtcagccccagagactgaccagggctctgggccagacgccgtgggccgggtacagggctgggcactgacccgccagcagctccaggccctgcttctcaagcgctttctgcttgcccgccgcagccgccgcggcctgttcgcccaggtgaggagggctagcaccagggagtcgcatgggagtccctgagttccctaccctggccgtccactcagtggcctaatccaaacccttacccccgtgtgtattcccaacccaaagcacatttattgagggcactggggagccatgggtggttgtagagcaggagcagggacaggtgcaagcaagcctggagggtggatggaagcagcagctgatgggctggtcccccagatcgtgctgcctgccctctttgtgggcctggccctcgtgttcagcctcatcgtgcctcctttcgggcactacccggctctgcggctcagtcccaccatgtacggtgctcaggtgtccttcttcaggtgggtgcagaaggaaggggctggtggcaggaagactagggacctgggggtacagccctgaccctacatctcccctcacacacagtgaggacgccccaggggaccctggacgtgcccggctgctcgaggcgctgctgcaggaggcaggactggaggagcccccagtgcagcatagctcccacaggtgaggcgtcttgttggcctggacctttcccctctctggcctcagttttcccatctggtccctggccagggagcctcagggggcacctggagcatcccctgtgcccacctgggagctgggagcctctgtggctccaggaacccccagaagctgggtgcccacagaccttcaccttgaccctgcagcgcccttgagtgtgcacagcccattgtctgcaggttctcggcaccagaagttcctgctgaagtggccaaggtcttggccagtggcaactggaccccagagtctccatccccagcctgccagtgtagccggcccggtgcccggcgcctgctgcccgactgcccggctgcagctggtggtccccctccgccccaggcagtgaccggctctggggaagtggttcagaacctgacaggccggaacctgtctgacttcctggtcaagacctacccgcgcctggtgcgccaggggtgagccatgccctgggactcagtttccctggctatagcatgggtccttgggttgctggggctggtgtggtcctggaggaggaagtggaggggttggatgcccagcttggggctacgggctgggagtctcgcgtaccttcctttcctctttttttttttttttttttttgagatggagtctccctctgttgcccaggctggagtgcagaggtgtgatctcagctcattgcaacctccacctcccagtttcaagcgattctcctccctcagcctcccgagtagctgggattacaggcacgcaccaccactcccgactaatttttgtatttttagtagagatggggtttcaccgtgttgccaggctggtctcgaactcctgacctcaggtgatccacccgccttggcctcccaaagtgttgggattacaggcaggagccaccgcgcccggctttctttcctgtttttgtccacccttgactctgtgctcccctctcaccatctctctctctgtcccacatccctgtctgcctgtgtctctgtccatctctcccacagcctgaagactaagaagtgggtgaatgaggtcaggtgaggaggggtctagcttggggtcccctgccccagttccactcccatgccctctgcctgccccctgggagctctcccggcccccccggccctcagctccccttccctgcctgcatggccccacagatacggaggcttctcgctggggggccgagacccaggcctgccctcgggccaagagttgggccgctcagtggaggagttgtgggcgctgctgagtcccctgcctggcggggccctcgaccgtgtcctgaaaaacctcacagcctgggctcacagcctggatgctcaggacagtctcaaggtgggaactgggggggcaggtgggcgtcctgtcacagcaaggtccaaccccattgctctgaccctatgaccttgacccccacccagatctggttcaacaacaaaggctggcactccatggtggcctttgtcaaccgagccagcaacgcaatcctccgtgctcacctgcccccaggcccggcccgccacgcccacagcatcaccacactcaaccaccccttgaacctcaccaaggagcagctgtctgagggtgcactgtgagtccctccaccctgcatgtcctaccctgcacgtcctaccctgcctccatttctctgtcgtttggggtggtgggagctggatttgaaccctgacacactcttgctttataaatgggggatagaaactgttcctctgctccctaagccagggaaatgggacctcctcagactcagcgggccccagcctcccccacacatcctcatcccaccaacctttatcctgcctgagacctgtacaacctctgctgccaaatcccaggcaccctcatccctaaattgcccctgccatctctgccactgctgactgccccatagacctttgtcccatcaatggcgtgttcagctctgctctgagcaacccatgcaccctcaccctacaacagctctcatgtcttcacctccaggatggcctcctcggtggacgtcctcgtctccatctgtgtggtctttgccatgtcctttgtcccggccagcttcactcttgtcctcattgaggagcgagtcacccgagccaagcacctgcagctcatggggggcctgtcccccaccctctactggcttggcaactttctctgggacatggtgcgggggctgcttggacgggtgggggcccagccactgcttgccactgccctgtctggccccttgtaggcaggggcttgtccaagatggcctgggtaaagtcttgaggattgtgggagactttgtgccttcctactcaaaaagcaaggaggtcagggtgggaacagggctgagggtggcagtgcccacctctttaggctgataaaggtaactgccatctccaatgcagtgtaactacttggtgccagcatgcatcgtggtgctcatctttctggccttccagcagagggcatatgtggcccctgccaacctgcctgctctcctgctgttgctactactgtatgggtgaggcccccagtccctcagggcctattcttactgaccccttactgccttccacattaatgctgctgagatagaactctgcagtgactcccaaggagaggatatggaggtctgaggtgatgccgtgtgtgatccaattcagtggtgtgccaaggtggccttaaaagctcatcttatcctgactcatattagtagagttctaaggcagcccatgcctgtaattccagtactttgggaggccgaggcaggaggactgcttgtggccaggagtttgagaccagcctgggaaacatagagagacccacctctaaaaaagaaagaaagagagagaaagagaaagagagaaagaaaaaaaaaaaaacagaaatgtgctttgggtgaaaatgtcaaggtctaaggcagagaagatgggaatggagatttttattcctctcagggcttctcagtctgagtggttactccagtgactcctattgtcccttcagctggtcgatcacaccgctcatgtacccagcctccttcttcttctccgtgcccagcacagcctatgtggtgctcacctgcataaacctctttattggcatcaatggaagcatggccacctttgtgcttgagctcttctctgatcaggtggggcaccacgaggctggggcttgggctgggttgggtcgttggactcagcccctgaccaacatccgtctcccacccttgagcagaagctgcaggaggtgagccggatcttgaaacaggtcttccttatcttcccccacttctgcttgggccgggggctcattgacatggtgcggaaccaggccatggctgatgcctttgagcgcttgggtgagaacttcctgtcaggtggggccatggctacagatagctagcacccttggagacctagagttaattatacagagtggagaaaaacagccccccagggagacagccagggttcttaggtggccctaaggttgggccaagttggaggtacaagaaagcagccataaaaagctaattcttagattacatcacaagaggcctcttctgttttctatgccaattagactccagctgagtggcctatccaatttgtgttcctttcccttaagaatccagagtgacatggatggagaaagggccagaaaccaagactctcatggacccagtccctcctttctatatccacaggagacaggcagttccagtcacccctgcgctgggaggtggtcggcaagaacctcttggccatggtgatacaggggcccctcttccttctcttcacactactgctgcagcaccgaagccaactcctgccacagttagtgaggtctatggagagggtggcaggggccaaggacctactttaagcccacagatattctgtccccaggcccagggtgaggtctctgccactcctgggagaggaggacgaggatgtagcccgtgaacgggagcgggtggtccaaggagccacccagggggatgtgttggtgctgaggaacttgaccaaggtaggtgtggtcaggtcgactgctgggtggggggtgctcccactggcccactcacctttctgaaagacctgcactctcccaggtataccgtgggcagaggatgccagctgttgaccgcttgtgcctggggattccccctggtgaggtgagtccaggggtggaggccaggtgcagggacagtgagtggctgccctactgcatgccctgcccatcatcctttactgaacacctactgtgtatccaccaccttttattgggcacctactgtatgccaatatttgtgctcctatttttattttattatattattatttatttatttatttatttatttatttatttgagatggagtctcactctgtctcccaggctggagtgcagtggtgggatctcagctcactgcaagctccacctcccgggttcatgccattctcctgcctcagcctcccgagtagctgggactgcaggcgcccaccaccacgcccggctaatttttttgtatttttagcagagacggggtttcaccgtgttagccaggatggtctccatctcctgacctcgtgatccacccgcctcagcctcccagagtgctgggattacaagcgtgagccaccacacctgccctattttatctttttttagagacggagtctcactctgtcgcccaggctggagtgcagtggtgagatctcggctcactacaagctccacctcccgggttcacaccattttcctgcctcagcctcccaggtagctgggactgcaggcgcctgcca[184 bp omitted]ctactgcatgcttacctctgttaaacacacactgtgctcactaaagaggtgtactgaatacttttgtgtccatcaacgtttatcaaataccaatagaatttattggacccctattgtatacacatctacatcaagcacttgctcacagccagcatttatcaggcacctgctttgtaccagttcacattcaagcacctactatatacaaatgtatttgctgtgtgccacttattggccacctactagggctggtacacatctgcaaacaagtgctgtttgttagcacacattgcagtatatatatatatttttttttctttttttttcttttgagatggagtctcactgtcacccagcttggtgtgcaatggtgtaatcttggctcacggtaacctccgcctcccaggttcaagcgattctccagcctc[133 bp omitted]tggcctccgaaagttctgggatcacatgtgtgagccaccatgcccggcctttgtttttttctttttttttttttttgagacaaagtctcgctctgccacccaggctggagtgcagtgtcacgatctcggctcactgcaacctctgcctcccaggttcaggcgattctcctgcctcagcctcctgagtagctgggattacaggcgcccgccaccacaaccggctaatttttgtatttttagtagagatggggtttcacaatgttggtcaggctgatcttgaactcttgacctcaggtgatctgcccacctcggcttcccaaagtgctggggttacaggtgtgagccactgggcctggcccacagtatatctttactaagcacctactgtgtgctggccaacctctctaccttgggctgactgtgcacctagcctaagtacacacagtgtgccaggaaacatatggagagctcatgccctgatatttgttgagcactgctgcacacgacctttatagggtacccactgtgtgccaaaagccattccctgctaagtgacagctttatgcctcgctacataccccaatatctgcctagctcccccggggccccacccacggccttccatgtggacactcagaaatcagaggtgctgaggccaggcgtggtggctcacagctgtaaccccagcactttgggaggccaaggcaggaggatcacttgaggtcaggagttcgagaccagcctggccaacatgccaaaaccccgtctctactaaaaatacaaaaattagccgggcttggtggcacacgcctgtagtcccagctactccggagcctgagacaggagaattgcttgaacccaggaggtggaggttgcagtgggccaagatcgtgccattgcgccggggtgacacagcaaggctccgtctcaaaaaaaaaaaaaaaaaaaaaagaggctgggtgccgtggctcacgcctgtaatcccagcactttaggagttcaaggcaggcggatcacaaggtcaagagatcgagaccatcctggccaacacggtgaaaccccatctctactaaaaaaaaatacaaaaattagctgggcatggtggcaggcgtctgtagccccagctacttgggaggctaaggcaggagaattgcttgaacccgggaggcagaggttgcagtgagccaagatcgcaccactgcagtccagcctgggaaacaagagcaaaacttggtctcaaaaaaaaaaaaaaaagaaatcagagatgccggaaccagggcctggggcctcactgagcaccatctgtgggcatccctgtagtgttttgggctgctgggtgtgaatggagcagggaagacgtccacgtttcgcatggtgacgggggacacattggccagcaggggcgaggctgtgctggcaggccacaggtgaggggtgccaggtagggtcagggtggggcagggttggccctgacgtccttgtgcttccccacccctccacctccagtgaatggactgggctcactgccccacacctgcatggtctctgagacccctgcacctctacctcccacacgcggaccaggccctgagacacccctgtcccttatcagcgtggccctggatgggtgggccctgagacccctgtgttagccaccagtatggtcagggactagccagctctctgagcccccggcgcccccatccccagcgtggcccgggaacccagtgctgcgcacctcagcatgggatactgccctcaatccgatgccatctttgagctgctgacgggccgcgagcacctggagctgcttgcgcgcctgcgcggtgtcccggaggcccaggttgcccaggtgagcccactttgtccccaccgctctcacctcccagggcccacccgacccaggccgtgcctctaaagcctggcccaatcccgcactctctcgccttggctccatccctgtccctgcccccagaccgtgcttccttcccctatacctctgtcccccatcctggtccaatagggatgtggctagcccgcctctttgccccgcaacaccaagttccaccattctcattggtccacccacccttccttccgctgcacgttgcccctctctccttgactctgccttctgtggccctgcccacttgctcctcttctgcctaccccctagggcttcgcgcctttctcgctggggtcacggtcacattctcactctggccgttcccagtttgcagccgtttcactgcctcttccatctgcttgggggtcttgtctttgccctggcccgccccaccctcacactgtcccaccccatgccctttctggccctgcctcatacccatgttggctccacccacaccatggccctgctccatacccatcccagctccacccataccaaggccccaccccatactcatgctggctccacccacaccatggccccgccccatactcatgctggctccacccacaccatggccccgccccatactcatgctggctccacccacaccatggccccgccccatactcatgctggctccacccacaccatggccccaccccatactcatgctgtctccacccacaccatggccctgccccatactcatgctggctctacccacaccatggccccgccgcatactcatgctggctccaccagtgtggccccgccccatactcatgctggctccacccacaccatggccccgccccatactcatgctggctccaccagtgtggccccgccccatactcatgctgtctccacccacaccatggccccgccccatactcatgctggctccacccacactatggccctgccccacacccatcccagctccacccacaccatggccccgccccatactcatgctggctccacccacaccatggccccgccccatactcatgctgcccccaccacactatgtcccattctcacatttgccctgccccatgcccattatgcccctgctccacactcaatgctggccccgccacactgtggccctgccccatactcatcaatatgagtccccatgcctactctggccccaccccacagaccgctggctcgggcctggcgcgtctgggactctcatggtacgcagaccggcctgcaggcacctacagcggagggaacaaacgcaagctggcgacggccctggcgctggttggggacccagccgtggtgtttctggtgcgtgggagcggtgcctgggtggggtggggcctgcgacggaggcggggccttgcttatgggatcttccgtgctccccaggacgagccgaccacaggcatggaccccagcgcgcggcgcttcctttggaacagccttttggccgtggtgcgggagggccgttcagtgatgctcacctcccataggtgggccgggctctgatgccctgggctgtggttaaggtgatccaggcctggagagagagccccaaagcacaaggccacaggggatggggggtcctggccctagtggggcgagggcgccaggccccggggtgtaaggacacacagaggtgggacgcggcgccgggatcagaacggtctggggaagagtggggagatgtccacaccagaagggtggcccaggccgggggaagcaggcagtgtggcgccaggcacaggtggccccggcctcacggagctcgtggtgccgggtcccgacagcatggaggagtgtgaagcgctctgctcgcgcctggccatcatggtgaatgggcggttccgctgcctgggcagcccgcaacatctcaagggcaggtgagccggcgcggcctccaggcaggtgtggggtgagggtgggcacgtaggtaggctcaggggagaggccagacgtagagccgggtgaggaaagtttggctccaactggagagatggccaaggctttagattgtcctgcaggggtgactgagggggcgagacaggctggggtgtgctgggggcgcaggaccaggaggcgtgagccgggggctctgggtggatttagaagacacaatcaggtgtgcgttggagtaggtgcagcctggagaggtgagggtggattgatgggtggagttaggggagggcctggttagtgggcggggccataggaaagtggggcgggggtatttattgtgtgggcgggggtagagtgcaagggcgaaagaggagtgtccgaaaaaggagtcaagtggggtgatagcttcgagagcaacctgggcaacctagggagaccccatctctataaaaaatttaaaaattagctggacatggtggtgtgtgcctgtggtctcagctacgcgggcggggggtggcgggggactgagacgggaggaccacttgatcgctagggtagtacaagtatggggcggggccagagagtattaggggctggagggtgagctgaggtgggacctgggaaaggcccgatccggtagccctggccccactcactgcagattcgcggcgggtcacacactgaccctgcgggtgcccgccgcaaggtcccagccggcagcggccttcgtggcggccgagttccctggggcggagctgcgcgaggcacatggaggccgcctgcgcttccagctgccgccgggagggcgctgcgccctggcgcgcgtctttggagagctggcggtgcacggcgcagagcacggcgtggaggacttttccgtgagccagacgatgctggaggaggtgatcacggcgccggggtcgggctgggggaggcaggctgggggccaggcccgtgggctgaccgtccctcttgtcccctctgggctgcccaccgctaggtattcttgtacttctccaaggaccaggggaaggacgaggacaccgaagagcagaaggaggcaggagtgggagtggaccccgcgccaggcctgcagcaccccaaacgcgtcagccagttcctcgatgaccctagcactgccgagactgtgctctgagcctccctcccctgcggggccgcggggaggccctgggaatggcaagggcaaggtagagtgcctaggagccctggactcaggctggcagaggggctggtgccctggagaaaataaagagaaggctggagagaagccgtggtggtgaaaccgtgtgcatgtgtgtccttgagccaggctgcacacatgtccacacagctgcctgcacatgcgtctggatatggctggccccttgcaagctgagtgtgcacatacgggccaagtggcgattcataggacacaggtgtgagcgtgcctacagctgaccggatcccagctgtaaatgcctctgtggccagcccaggagttggggatgtgagtgcgggcctcataagggcctggtcacaccgtccctgtccccacgtccctgcgtgcctatgtggggctggcgcctaagggcggtacctgtaagtgcctggccataaagtggggatgaggtcaggactcaggaatgtcctgggaagcttacaggagcccggtgtcccggagcacaggccagggccgggccagaagcccatccgacatccagctgaccctcaccctctgaccccagccctcagcgccatgagtcgggggcaaagagttctcaagggtctgctgggctgggtttgcacttggacctgggcctggagagccagacttggagcaaggggctgtggccttcatgtcctgtgccccagagatctgcccctcccacccgaggtaggtgggaatggggtttgggaaaggaaagaggttggggttttgggattgggggtggggttctggaaggggacagcagggagacttggggaggggggagagagttcacactgcggggtgggggttgggggaaggtaggaggctgggatctgtatgcctgcagatgccccagctcttggccaatgccgcctcaggctgttatcagcaacgggtgcctgcgtcctgctgcccagcacgtccggtggtccagagtcactggaatgcagcttgggaggcggggctggggaccttagctaagggcaggtctggggcaacatgatatggcccacagggctgctgagaggtaaccaggtgtcctcagcatattctgccgatggtggggtccacaccacactttggggacccctgtgcaggcagcccaggaccaggtggacgtggggacccagacggacgtggggacccagacggacagggcccggtaacctggattgttctgacttcctggacgtctttgcccccagggtttcggttctgggcctcagtttccccacctgtcctcgacctgacccacttcacggggctgcagggcgggtgatgggggggaccctactctgcccggccctgctggggcccggccacaccctagggtctgcaggagaggcggtggagcgggcttgccttcagggaaaagggggctgcaggggcgcagcttcggcctgtgcgtgtgtctggggtctgagggcgaggctccaggggcttggtggcgtctgagcgcgtgtggaggtccgggtctctgcgtgtcatcgtgcacgtgtctgtgcacgcccactcgcgtccgggagtgagagtcagcgccctgcagtcggccgccccgtgcccgccagcgtcaggcaggggctcccggtcccaccccgcgagcggcgcggctccgagctcccgaaggcggaagcggggggcgcggcccggggctgggggcggggcctgcgacctcaccttcgcgcccactccgcagagccgcaggctgaggccgggaagggtcgggggcgaggccgcgtcgccgcctccccgaagccttttcctgttggggggagggcccgccagtgacggccgggcctgtcacgtgggcctgacagctggggagggggtggccggcgacaatgtggtcccgaagcggccagcgccgggagctgcagcgctgagacccccagcccgccccctcgggctcccggccggggccccatcatgttctccaggaagaaacgagagctcatgaaaaccccttccatctcgaaaaagaaccgcgcgggaagccccagcccgcagccctcgggggtgagtggagcccgggtgagacccggagctgacgccgggccgcagggggacagggacccgccctgtgctcggggctcatgctggggcggcggctgggggctcgtgccagctacagcccctaccgggcgggacggcaggggccacagcagagaggccgggaccccggcattcagctcacggtagggaccctgggagtggtggccgcctccctccactccatccagggctggccgcggggcccagggagcaggaagggagggtgccgggttgggacgatgttgtgtttgggccgctgcaggttgggggcttaggcaatctgggggctctaggggccgttgagatgggagggctgtggcctggccattgggctgaaggttgaccgggcagcagatcctctaatgggatccaccaggttcagaggttggggagtgtccccaggcctggggtgtctacaaagctggggggggggtctacagagcttgggggtccgggatgtctacaaggcctggggctgcccataggctctggggttccatggacctttaggggacagacagagtcagaagtgtgttcacttaaagcacctgcgttgtaggagcctgaggggggcttgaagggctgaggaccctccccacccccaccaggaagtggggacccccctcccgcgcctccccgcaggccccgccccggctgtggtttgggcaaggaccgttgtttgtgaaagctctagggaagaggatgttgggtaacaggtgggggggtacactaccaaatctcggccctgtgacctctggcctttgacccctgtggggtcagggtgatggtggccctccacagccccacttcatttctggggaaactgaggccgtgtccaggccggaaaatccctttaacgagctcccctcggacctgcccaaggagctgcccaggaaggatggggctgacgcggtgttccccggaccaagcctggagccgcccgctgggtcctccggcgtcaaggccacagggaccctcaagcggcccaccagcctgagccgccacgccagcgcggctggcttccccctgtcgggtgctgcctcctggacactgggccggagccaccggagcccactgacagccgccagcccgggcgagctgcccaccgagggtgccggcccggacgtcgtcgaggacatctcccatctgctggcggacgtggcccgcttcgctgagggccttgagaaacttaaggagtgtgtgttgcgtgacggtgagagccacggggacaccgaggcctgggtggaagacagagccagacccaagggaggatggagggagggacttggggaggctcagaagggagggaggctcagatggcagggagggctgtgtggaagaggccatgacagctaaggctctgagggatgtgtaggagtttggtgggggagtccctgagcgtacactggctcaagagggtgcccactttattttttttaaaggatctgatggcaattaggagggaaaggcagaggaaatgtcccatgcacaggctcagaaacacggaaacagagaatgcatttgggggccaaggtgtggggtgccgctggtgtaggatgaaggcatgacaacgccaggcagaagggcaatggggagccatagaaggtgttagagcacaggacagatgggggcagatctgtgtcttggaatgaagcaaactgggggttggctgaggtctgggtggagagagattcaggaggcatggcgaggggcaggatggggtcatcaggcggcggaggtgctgggacccagcggcctgcaggccggcagttccgttttctcctccacgcggccgctgacagccctgcttcctgccgagttattttcatctgcttcctgtttgtccctggcagcccaggcgggcacctcatgtgctgccttcagcccccggctcctcccagaaaccacagtgccagggtcatgccaggcgctctgatctgctcccagcagccgcccattttacagatgacgaaactaagtctctagtgaggccctgacccctggctcacccagccagggcagggcagagccaggactggacctcaagtggtggagtggcctctgcaccttcagggcactagttggggaaggcccggtccccactgggaggagtgggagcccccgggttatctggtcccaggggcgggggctaggctgctttcctggggaaaccctaatctcggttcctttccgatcctggcgcttccttggaggcctggcctgggcggggctcagctcccaggctcctgcaggaggtctgaactgggccagccagggtggggcacttttttttttttttttttgatacagggtcttgctctgttgcccaggctggagtccagtggtgtgattgaggctcactgttaccttgaactcctgggctcaagccatcctcctacctctgcctcccgagtacctgagactacaggcatgagccactgcacct[136 bp omitted]ggctcccgagtagctaggactacaggtgcgtgccaccacacctggctaatttttgtatttttagtagagatggggtttcaccatattggccaggttggtctcaaacccctaacctcgtgatccgcatgcctcagcctcccaaagtgctgggattacagcaggcatg[132 bp omitted]cctccacctcctgggttcaagtggttcttctgcctcagcctcccgagtggctgggattgcaggggcgcgccaccgtgcccggctaattttttttctttcttttttttttttttttagtagagatggggtttcaccattttggccaggctggtcttgaactcctgatctcaagtgatccacccacctcggcctcccaaagcgccaggattacaggcgtgagccatcgcgcccggccagtttttgtattttttgtagagaccggggtctccccatattgcgcaggctggtctagaactcccgagctaaaaaccgttctcccggctccgcctcccaaagtgctgggataacaggcctgatccaccgcgcccggctgggggcgccttctgtgcgtctcggggccgccccaggccagagaagaccctggcggctaggatgtgggctctagtcccgatgtttctcagctgctgagaccctggcaagccccttccctctctaggtgtcaggtgacttatctataaaatggggccacctgcatgcagcgatggttgtggggtccaccccacagcttggggacccgcgttcaggcagctaggaggggacccacatggacggtgccaccccgacacttcccgggcttcctcgttcccgggcttcaggtctgggcctcagtttccctgcccgtcctcgaccctccccacctcgaagctctgcggttaaggaaggacccaggctggggcgaacgggaccccagggcggggtttccctcgcgggggcggggcctcctgaccggccggagccggtttggccaccggagacccccatcggtcagctgccaggccccacgcgctcgcggtctccgcgccccgacggctgcgccatgtgtatctgcgggacggcgcacccggtgctggacgagggccccgtgcgctgccgggcgggcccccgaggtgaggggacaggtgccgggcgctgggtcccgccgcgtccgggagcacgtggcgctcgggccgtttgccgcccgcggtgggggagcagcggctgccgcgcgcctggcctggccgtgcgcacctgggcatccctgcgctgcgcaggggtcgcgccggccgccggcttcccgggtagggggtgtgcggggacagccgggggtccgtgcgccggccgcgcgcggagtgccgggtgcccggctggaaggtcccgagaaggggcgtggccggggcctcccagcggcttcccggagctcctggagccccaatcccattcccggagtccgcctcgcatccagcagcgaagacatgttccggtccggggtctcaggcccggcggcggccagcggggtatctctggcgggtgactcggtcggtctcttcccggaggtgacattcacctggggtcttcggtgccgaaagggatggggcacttactttttcagatttcatttcgtatttggggcatcctctgagcggtacagtcaggcgtcaaagctgcccctcccgctggcctctgtcctcccgggtacctttcccctcctacgaattccgtgggtttgtttccactacgtggtgtgtgcctggctctcgatgtttcgcctgtactctctgcttttttcttttctttccttcttttcttttctttccttttctttctttcttttctttcctttctttttgggatggaggagtctcactctgtcacccagctggagtgcagtggcgcgatctcggctcactgcaacctccgcctcccagcttcaagcgattctcctgcctcagcctcccgagtagccggcattacagaggagtgccaccacgctgctactttttgtatttttagtagaggcagggtttcgccatgttggccaggatggtctcaaactcctgacctcaagtgatctgcctgcctcggcctcaccaagtgctgggattacaggcatgaggcactgtgcttggccctctctgcttttttcttcttccaattgagaacgttcgatgagggcatttagctttttattctttattttatttcttacagagacagggtcttactgtattgcccaggctggtcttgaattcctgggctcaacccgtcctcctgcctcagcctcccaaagtgctggggtcacaggtgtaagccaccacccctggctgaggagggcagtgaaagccaggttccaacagtcagatctgacctcctctgttctaacaccttctatggctccctattgccctggagataaagccaggcaggatccctctgcctggcgttctcacgccttcagagctagcgtagatggaaaagctgtgtgattgttgagaaatggcttcccctctctatgcctcagtttcctcacttaggaagggcagagagagacctggacagggctttgagcagtcctgaggagttagggcagggaaggagcctggtgggctgcatggaggaaggggctgcaggactgtagcttgaaggacaagaggcagtttgctttctggagggacaagaaaagagtgttctgagcagcagagtgcctaggccaacgtctggcctttgttgatctggccggtagcccagggagggacagtgccctccccgcggtctcgaaatgagccccaggcatctgccgtcttccacctctgcctcagtttccccatctgggaacaggagctctaaagagggaggaggtggacagactttccctgggactgggccctaccccactgctcactccgactctccccagcagacctccttgaggcccgccgcccgcgggcccacgagtgcctgggtgaggctctgcgtgtcatgcatcagatcatctccaagtacccgctgctgaacaccgtggagacgctcaccgcagccggcaccctcattgccaaggtcaaaggtcagcctgctggaacagggctgcgagggctctctgcctagaagggcatcctggaggaggggatgtttgaagtgggttttgaaggatgcataggagtttgacaggcacaagctccctcctgttccccctgggttaagggctccggtcagttcttgcagggatggtcacctcccagagtgggcccacctccttgtccttatctctgcttcccagccttccattatgagagcaacaatgatctggagaaacaggagttcgagaaggccctggagacgattgctgtggccttcagtagcacgtgagcacgggagcctgtggggcagggcaagggagcgtggggggcccgggtgtctctcgatggtgacctcgctggccctgcagagtgtccgagttcctcatgggtgaagtggacagcagcaccctcctagcagtgcctcctggggactcgagccaggtgagtggggtgggccagggccacctgtgtccagcttctggaggccagccgggttcaggtctgcagggcccagacagtcaccctgcttcccctgtgcgccttggtttccctctctgggggaggcagcaaccgtcccctgaagggtgggcactgcccagggccccgcatggggctggtctcacctgcgtctccgtcctacagtccatggaaagcctgtatggaccgggcagtgagggcacgcctcccagcctggaagactgtgacgccggtaagcccccacccagcggcaggcaggcatttgaggggtgggccattgcgcgggtcgggccaggctgagcaggcccccgttccctgcaggctgcctgcccgccgaggaggtggacgtgctgctacagcgctgtgaggggggcgtggatgccgcactgctgtatgccaagaacatggccaagtacatgaaggacctcatcagctacctggagaagcggacgacgctgggtgagagctggtgtcccagcagggtgggtctggagggagggggttctgggtgagctgggaaggccttgtcccagcacctcacacccctctccggcccgcagagatggagtttgccaagggcctgcagaagatcgctcacaactgcagacagagcgtcatgcaggaggtgggggccccgcgggcacggggcgggggtccctgggcccgggtgtgagtctcagccccatttcaagggcccagggaccaagagcaggggcttcccctctacattaacgggggtggctgcagggaccagggagctggtggctgggggtgctggggccgccctgcctccatccctccccacccagtgagccggtgccccacccacagccccacatgccgctcctgtccatctactcgctggccctggagcaggacctggagttcggccacagcatggtgcaggcggtgggcaccttgcagacccagaccttcatgcaggtgcgtggtgcccgggagggcgggctgggcgggggtgtcaccggggtacccactcacggcccgtctcgccccagcccctgaccctgcggcggcttgaacacgagaagcgcaggaaggagatcaaggaggcctggcaccgtgcccagaggaagctggtgaggcgggcgggcgggggcgggcgggggcgggcagcgggcctcggcgcaggcgcagtcccagccccagccccatagcgagggccctgcggcgagctccgcacacgccccggcctcctgcgcatgcgcggcctcgcaggctgggccgccccccccaacgccaagccgggtcggagatgctccagccccgtcgcccccagctctgcctggaaggacccaggagcccggcgctcactgctgtccctgcagaaatggggagaagccgtgcctccctcggttgtaagcagctggtctccgggttgagggagactgatggtctctcaggactgggaaagcgccatgctcctgcatgtattctttttttttttttttttgatacggagtctcgctctgtcgcccaggctgcaggctggagtgccatggcaccatctaggctttcactgcaacctccatctccctggttcaaacaattctcctgtcgc[134 bp omitted]cggcctcccaaagtgctgagattacagacgtgagccaccgcacccacccggcctcctgcctgtattctcttcccacttcgcttttgggttatttcaaagacgccggcgcctttttgtttgtttctttgcttgttttgagataaggtctcgctctgtcacccaggctggactgcagtgacgcaatcatacctcactgcagacttgccttcttgggctgcaatgatcctcccacctcagcctcctgagttcctgggtctacaggcaccagccatcacacccagttcatttttttgtattttttgtatactcactatgttgcccagtttttgtttgctttttagctgtgttaacacggtctgcagtgaaacgcaccctcctagctccttccagcacataccggcaaacacatatctgccctgttttgtacacacgaggacagctcacctcatgccctgttctgctcctgatttttatcctcacctccatatagagaggctcacccgatatcagtcagcatgaagcagcctgaaccccttttttcggctgtgcagggctcagctgaggagattgagtaggttatttcatggacgtcttgggagtggctgagctgttgctgttacgaacaccattgctatgacaagcttgtgcccctgtctcaaggatgcctgagggatcagtgcccaaaatagaactgctgggtcaaggggcgtgcgtgtatgagctaccctcccaggccacagccctgcttttcctcttctgtgaaccctcagttcttaacctttgcttagttcttatcctttgcttactttgtactggacagtggcttatcattgatttgtcagagctttttacatattagagaacttaggccttaatcatgtgagttttagactccccccattcccctcccacaatttactgtttgacttttgatttttacctg[131 bp omitted]cactgcaacctccatctcctgggctcaagcgattcttctgcctcagcctcccaagtagctgggattacaggcgccagccaacatgcctggctaatttttgtatttttagtagagatggggtttcaccaccttggccaggctggtctcgaactcctgacctcaggtaatctgcccaccttgtccttccaaagtgctggaattataggcataagacaccgtgcttggctaatttttatatctttggtagagatggggtttcatcatgttggccaggctggtctcgagtagctaggaccacaggtgtgcgccaccacgtctggctaaattttttaatttttttgtagagatggggtctcactatgttgaccaggctggtctcaaactcctggcctcaagtgatcctcctgcctcggcctcccaaagcactgggagtacaggtgtgacccatggcgcctggcggtctcctagtaattggatgagtccgtttgtttgtgtgcgaatctgatggtgcaggttgtgaggtgtggcccccgagcccacaggtttttgactaagtgctcttcctgccaacctgtgggcgcctggcttcctgcctgggcggcttctctgttctcgtctgtgaggagggaagtgaaagcaaaagagcccggagacgctcccgtgggggctggtgtgcgtgtctgcagaggctgccgtgtgagcctctgtgcagagcttggctgcacctcagcttcccgggctgcagagtgggcacacaggacacccatttctccgagtgtcctgttacgggtgcctcctcccgttcttttttttttttttttttttgagctggaatctctgttgcccaggctggagtgcagtggtgcatgcaatcttggctcactgcaaccttcgcctcctgggttcaagctgttcgcgattctagtgcctcagcctcccgagtagctgggattacaagcgtgcaccacaatgcccggctaattgttttaaattttgggtagatacggggtttc[131 bp omitted]ttgtgcagggtcctctgcatgcccagctgggccatggggccttgctgagagagatgggggtggggaggaaaggaggagctggggagactgagtcccatccgaggatagggttggaactggcctcctggctcccacacccacagcaagaggcggagtccaacctgcgcaaggccaagcagggttacgtgcagcgctgcgaggaccacgacaaggctcgcttcctcgtggccaaggcggaggaggagcaggctggcagcgcgccgggagcaggcagcacggccaccaagaccctggacaagcggcggcggctggaggaggaggccaagaacaaggtgagggcgggtggaggcagggctggaggtccctggaggaggagatccaatgcttggtgtgacatttactacctccagacctttgtttttgtttttttgtttttttgtttgtttttgagacggagtcttgctctgtcgcccaggctggagtgcagtggcacagtctcggctcactgcaagctccgcctcccgggttcacgccattctcctgcctc[175 bp omitted]cccggccaatttgttttttggagacagagtctcattctgttgcccaggctggagtgcagtggtgagatctcactgcaacctccgcctcccaggttcacacagttctctgcctcagccaccctgccaccaagcccagctaatttttttgtatttttagtagacacagagtttcaccatcttggccaggttggtctcaaactcctgacctcatgatccacccacttcggcctcccaaagtgctgggattacaggcatgagccaccgcgcccggccccgatttttaaattattattatttttgagacagtgtcttgttctgtcacccaggctggagtgcagtgacgtgatcatggctcactgcagcctctacctcctgggctcaagcaatcttctcgcctcagcctctagagtagctgggaccacag[355 bp omitted]ctcaggctgagtgtggtggctcacacctgtaatcccagccctttgggaggctgagacgggcagatcatatgaggccaggagttcgaaaccagcctgggcaacatggtgaaacccctgtatctctactaaaattacaaaaaattaaccgggtatggtgggtggggggcacctgtaatccgttacttgggaggctgaggcagaattgcttgaacccggtaggtggaggttgcagtgagctgagatcgtaccactgcactccagcctggcctacagagcaagactccatctcaaaaaaaaaaaaaaaaagatggggagggtctcaccatgttgctcaggctggtctcgaactcctggcctcaagcaagtctcccactgtggcctcccgaggcgctgggatgacaggcgtcagccccgcctccctgaggtttctgtctgagtcctgcaccccgggctgaggcctctctctgtgcgccccgcccccaccgcaggcggaggaagctatggccacctaccgcacctgcgtggccgacgcgaagacgcagaagcaggagctggaggataccaaggtgacggcgctgcggcagatccaggaggtcatccggcagagcgaccaaaccatcaagtcggtgcgtggggtgctccggccgcccgggcggggatggtggaccgggcggcctcctcctgacccctccgctctccggtgccgcccgcaggccacgatctcctactaccagatgatgcatatgcagacggcgccgctgcccgtgcacttccagatgctgtgtgagagcagcaagctgtatgacccaggccagcagtacgcctcccacgtgcgccagctgcagcgggaccaggagcccgatgtgcactacgactttgagccccacgtctccgccaacgcctggtaccgccacccagctgccctgtccccggcgcacaaggccctgcctgggagccgggcttccctctgtcgggggcatgaagatgaagctgtcttgccccccatcacctcccctccttttcccggtttcttccactaggtcccccgtcatgcgtgcccggaagagcagcttcaacgtgagtgatgtggcgcggccggaggctgccgggagccccccagaagaaggcgggtgcactgagggcacacctgccaaggaccacaggggtgagtgtccggcggggcccaggggcggacgctggctccctgcgacccaccctggcccttcaccagagacgcctctttctccagccgggcgaggacaccaggttcacaagtcatggccgctctcgatctcagactcggacagtgggctggaccccggccctggcgcaggtgagggaggctctctggcgggctggggtgtggagctgcctcctctcctgagcctcagggtttcatcacccaccggggtgatggagggggcccccctggctgggggagtctgaacagtcctgattcccgcccaggggactttaagaagttcgagcggacgtcatccagtggtaccatgtcgtccacggaggagctggtggacccagacggtggagccggggcttcagcctttgagcagggtgagggtcccctgacggggctggagagagaggggggtttggacacagtccatgggcctggccctgagctgccttggtgacaccggctgcctgtgctgcccgcagctgacctcaacggcatgacccccgagctgccggtggccgtgcccagtggaccgttccgccacgaggggctgtccaaggcggcccgtactcaccggctccggaagctccgcacgcccgccaagtgccgcgagtgcaacagctacgtctacttccagggtgctgagtgtgaagaggtgagtgggacgccccgacggacagctgggagccttcgggagcctttggggtgcccagcaccgccggcctgtgtgccctcaggaatgtccggcccagagcagggagcagtcggacgcctttggaaggaagcgaacggagggggtggggtgggctcttttagttctggggagcagggttggctctctgaggcagcgaggcagggggcagacctggagggtgaagagtcctggggctgtggccagaagacctggagggcaaaggccctggagctgtgtccagaaaaccaaggggcgggaaggagaggaggccacagggcaggcgggatcacccctggggtggaagccacgagccactgtccagcttgtgtttgcagaagctgccgtgtgggggctgtgagcgccccggggaggtggggtggagccgctgggggctgcgctgagctgggcgccccggggctgggctcactcactctggccgcccccagtgctgcctggcctgccacaagaaatgtctggagacgctggccatacagtgcgggcacaagaagctgcaaggccgcctgcagctgttcggccaggacttcagccacgcggcccgcagcgcccccgacggcgtgcccttcatcgtcaagaagtgcgtctgcgagatcgagcggcgggcgctgcgcaccaaggtgaggcgggggaggaagcggctcacagcgaggaggcgggagtgggccgaggctgatgggcctccccacccccgggctcccgcagggcatctaccgggtcaatggggtaaagacacgcgtggagaagctgtgccaggccttcgagaacggcaaggagctggtcgagctgtcgcaggcctcgccccacgacatcagcaacgtcctcaagctctacctgcgtcaggtgagacccaccggtggtggccaggcagagcctggaaggggcgtagccaggcaggaggaggcggggtgggggtccgggagctggagcaggactgagctggagcaggactggcgcaagcgggggcctggggaggacagggtgggcgggacagtgcctggcagggcagggctgaggctgggggcgtggtcacggtaggagcgaggcggggccagttctgcgccgaggcacggacagggacaggaggggcggggtggggcttggtcagcacgtggcaggggtgtggccacggcagaggcacacctgacgctgtgcgggggcggggccggggccggggctcggtggggcgtggccagagcaagatgggcgtgttcagcgcttggcagggacccgtatgaggctaggggcggggctgaggctagacaagtgcggggctggcggtggggcctgggcttggtggggcgaggctggggccaggggcgtggtcatccccggggaagggcgggactggggctaggggcgtggtcatgtctggggaagggcggagctgggctgggatgggagtgggaccagcacttcgcaggtggttgggaaggggtcagactatgctgagtggagccggagctcgttagggtacctgcagggcggggcgcgcgtggccagagcgagaaagggagtggagctgcgggcgtggcccgggtaggaggggcagggctcacgctgggctgggaaaggggactgacgccgctctgggtggaacccgagctcggtggggtgtggccagtgctctgtgggggtggggctgaggctgggggcgtggcaggcacacgtgggggctgggccaggcccaccaacacctgctgacccttgactctgcgcagcttcccgagccgctcatctccttccgcctctaccacgagctcgtagggctggccaaggacagcctgaaggcagaggccgaggccaaggcggcgtcccggggccggcaggacggctcggagagcgaggcagtggcggtggccctggcaggtcggctgcgggagctcctgcgggacctgccgcctgagaaccgggcctcgctgcagtacctgctgcgtcacctacgcaggtgagtcccggcatatggagtggagggcgcggggtcccgggagccgctcagcacctggcccctgcccaccccgcaggatcgtggaggtggagcaggacaacaagatgacccccgggaacctgggcatcgtgttcgggcccacgctgcttcggccacggcccaccgaggccaccgtgtccctctcctccctggtggattatccccatcaggcccgcgtcatcgagactctcatcgtccactacggcctggtcttcgaggaggagccggaggagacccccgggggccaggtgagggtgtgggcctgaccggggctggccactcggggcttggggagcagggggcgctgctggggacagtcgttgtcggatgaagcccaaggaaccacagggagataatttggtttggacagggctgttcgggaggccactgtctttttgtgtcttttatgcaaaaaactcagcgaggtctgcattgaatctggcagaggtgcaaaggctctgcggccgcccctccactctcccttggggctggccttgggcctcacccttcacccccagcttccttccccgtttcccatcccggtgctgcctgcagccacaagctccacgctggcccggtgtccacagcctgcccgagctgccactgcactccgccgcgaggtcaattccccgcttcagattttcttttctgggagttgtagtttcgctcctgctgcccaggctgaagtgcaatggggcgatctcagcccaccacaacctccgcttcccaggttcaagcgattctcctgcctcagtctcccgcgtagctgggactacaggcgccggccaccacacccggctaatttttgtatttttaacagagatggggtttcactttgttggccaggctggtctcgaactgctgacctcaagtgatccgcaccccccttggcctcctgaagtgctgggattacaggtgtgagccactgcacgcggcgtctcgtattctttcaatccatcttccctgggtgtttaggggctgcggtttctcgggtttgctcttggctgaggacagaccgcctgggcaacagcgggtgtcagtagctgttacgggctgtgtgggtgggtttgttaatttataacatggaaaatggagccccggcccctctatgacttccgttctgcacttgcaggacgagtcatccaaccagcgagctgaggtagtcgtccaggtgccgtacctggaggcgggcgaggcggtggtctacccgctgcaggaggcggcggcggacgggtgcagaggtgagtgtgtggctgcccgaacggccccaagggaggctggcgtgtgccacccatgggcgcaggtgccatgacctagttgtacacacgtggcagggtccacggtgctgcacattctgtggatttcgtctgccacggagaccacacctatgagctactcattcagtgtcctttaaccggctgcaaaaacaggcaaggcagtgccttttgaggtgcctaccccgcactcagaaaccagtaacgtgaacgtggggctgatgccttgtgaggctccaggtgcaccaggtcaggctaagtgcctttcctgcaggagcccgtttttctagagaagggcgtggggctgggagtttgacccacgtggggccagcaccacctgtcagaggcagctggccgagtgccgcatctagttatgggacacctgtgttgtctgtcttcacactgctgataaataaatacctgaggctgggcacggtggctcacgcctgtaatcctcgcactttgggaggacaaggcagatcacttgaggttaggagttcaagaccagcctgaccaacatggtgaaatcccatctctactaaaaatacaaaaattagacaggtgtggtggagggcacctgtaatcccagctactcaggaggctgaagcaggagaatcacttgaaccggggaggcagaggttgcactgagccaagatcatggcactgcactccagcccgggcaagagagagagactctgtctcaaaaagaaatacctgagactgggcaatttacaaaagaaagaggtttaatggagttacagttccatgtagctggggaggcctcacaatcatggcagaaagcaaagaggagcaagtcacatcttgcatggatggtggcaggcaaagggagagcttgtgtccggaaactccagtttttagaccatcagatcttgtgaaacccacgtactatcatgagaacagcccaggaaagacgcacctccaggattcaaccatcctccaccagctccctcccacaacacgtgggaattatgggagctacaagatgaggtttgggtggggacacagagccagaccctatcaacacctctctccttccgtttctccccttgtctctctctcctcctccccgccatgtctctccatctgtctgtccctccccttgtctctcctccatctctcctgtctctccccatctctcctgtctctccatctctctcccccctctcctgtctctccccatctctcctgtctgtccctccccttgtctctcctccatctctcctgtctgtctccccccgccatctgtctccctttcttagaatcccgagttgtgtccaacgattcggactcggacctagaggaggcctccgagctgctgtcctcatcggaggccagtgccctgggccacctcagcttcctggagcagcagcagagcgaggccagcctagaggtggcttctggcagccacagcggcagtgaggagcagctggaggccacagcccgggaggacggggacggggacgaggacggcccggcccagcagctctcaggattcaacaccaaccagtccaacaacgtgctgcaggccccactgccccccatgaggctccgtggcgggcggatgacactgggctcctgcagggaaaggcagccggaattcgtgtgagctggggtggggctgggaccacaggtggcttctctcttgcctgctcctgtccctccagcacgtcccctgcaccacggcatagcttaggtgcgccgtcctggggtcgctgccgagagcgcctggacttcgacgtcccaccagcgggcgcctcctcccagaggcttccaggagcacgagggccttgcggcacaggactgtgccctgtgctgtcccctgcaccccggctcagctgagctggggaacactgctgtcgtgtgaagtcacagtggccttgttggtgcccacagggctgtgtggatggaggaagctgtccctgcccagtgcatcccccaggtcatcacggggacgcaggaggcaggccctgccctgccctctcctcacaggtctgttgcagggactccagaaaccattctgggagccgtggatgggggcggagctggggtttggtgcagtttccagggtgcagtacagcagggcctgaatactggccctggactcccttttccagaacaccaggtgtggccacctggggctcaggtacacagtggggtctctcggaagccaccgtgtggttctttcacaggcacgtttattttgctgaaataaaaagtttttaatcgggtgttttctgtggcagctgcaagcttagaagattttctgtggcagctgcaagcttagaagaaggggccagggaggggacagagagagccccgtggcgtggccctgggcctccccctaggggagggatgtgtgaggaagggaaccccccgccacggggccccgcgaggtgggagcccgggtggtcttcaccacaggctgtgcagacggtcaggcatcgaatgacctcgtcacgtccacctgcagcccagggcagtccaggaaaacgttctcgatgacggacgtatcccccggctctaaggtttcgcacgtcagccccacatggccaccaagcactggaaacgtggcccatgcgcctgtggaactgcatttttttttttttttgagacagggtgtgaccctgtggcccaggctggagtacaggagcacaatcgtagctcactgcagcctcggcctcctgggctcaaatgatcctcccgcctcagcctcccaaagtgttgggattacaggtgtgagccactgtgcccaggtaatcttaaagttttttgtagaggtggggggtttctctgtgttgcccgggctggtcttttaactcctgagctcaagcgatcctccacttcctgggttcaagtgattctcctgccttagctcccaagtagctgggattacaggcatgcaccaccacgcccaggtaatttttgtattttttgcagtgatgggattttg[144 bp omitted]atgacacactctgtcccctccctcctccccagccctgggaacccccatccccacccaactccccagtcccgggaacccccatcctacttccagtctctgacgactctagtgacctcctaggagtgacatcagtgtttgtccctttgggtctggcttgctttggccaagacaattttgaaaaaagtacatttggagagaaggggaagcactgtccccatcacacacacagtccgcggcctggggatctggggaccctgctgcacagaacagtgggcgcgttacagaccaccgaccgcccgagggtgaattacatcttaataaagctactgtgagagaaccacgtggctaggttaaacttgggcaggcgaggccttctgaaatcagacagtaagcaaacggggaagtagagccagatcccaaacgtctgtaagaggaactggccgcaaaccacagctgcacaagccagagaacaactccacaccctcacgggaagggaagagacagacacgctcacgccttacccaggagcacgaagtgggagggcagggcgagggcctggggagacactgacccctgaagccagcgcgaggagggcacacctgccaggctgacctcgtgtgcttggggtgaggcaaggccacctgctggaaaccttgttagtcggcctggtttctgtatcaagcaaatttatttgctcaaaacatctttaccatttgaaaacacccaacctcctacaacaaccgagaactccagagctggcatctcgcaccctggtggcttgagcgcgtgcatggctgtgaatggagtaaagagccgaggccgggcgggggccgccacgcatcagggcccccgagggagggaagacgaggggtggaaggccgagggcccaggaggaagcagtggctggtgggagacccggaccccaaacccccaacagaggggacccagcgtggtctgggtgaagacccggcaccagctgcccccaggtgacctccctctgggggccttgttccttctgaggctgcatctcgcacaaatccacaggtgaatggggcgggctgggccacaggaagcctcaccccaggacgggagaacgtgggtggaggccacctgccttggggagtccagaggagcagcagccgtgagagctgtgggggccggattctggcagggcaggggcgtttgtcctgcagggatgggggtcgctgtgtgtccgcctctaggggctaggaaagggggagagtggtcacacgacaggggcagatccagtatgcccaggacagcacaacgcccaccgaacgtgacggggtgcgggaggcctggcaggaggcggcccaggccgcagtgcagaggccggacggctcccttgtgcccagcggtcacacaggcgtgggcagtagctctgacctcaaaggaaccgtgccagcgtcagaccaggccaagccccacccctgggctgagtgtgaagtggggcggcctgcaggacagcagctcgccatgaccagagtccaggggaagctgggaggctctcgccatgggcagaggctgtcccgctcctgagactccggccagtccctcccaaggtgcccactcagggaagggttggcctgaagctgtgcctcctctctcagctctggggtctctgggcaggtttctaaaccctcttctggaaagtcccgccgcacaactgccctgcaggtgaacgtctcctgcttctaaggtgggtcagcggcggagagacgcacgccccgcgtaccaggactctcccgtccaggcgcacagccccaagagctgcagcctacggtcgggtggggtctgggggtctgggggtgtcctgggagcgcctggtggcccagctgggctggtgctaggagggtcttgctgccggacaaagcaagaacagccctgcacaccgacggaggggacgacacccctgcctctgaccccacctcagtgcctgtccctcggccgtctcacctgtcaggcggtagctactgcaccagccggtaggtgatgtacctgccagccgtctcactgggccggatgatcttcaccacctgcagagacagagagcaggggctgcgaatgcttgaggggtctcactgcagtcaccagacagcaggcgggcagcacacgggctggggatggccggcaggggtccgagatggctgaccctgggctgtgggacccgctccctgggaacctgggtcacgctcttctctgggcccagtggccctggctttaagagggggatattgggggtgtggtctcgaggtcccctccaggccctggatcaagggggaggggctgtcggggagggacagaagcccccttctccgagtggtcagctcagagcagccccagggccccttctccccacagggctcacctgcccacgctttatcccaaagtagcgcgccacagggtcccccgcctggatcctgggcagctggttctctcggagcttactgcgaagcaccgtcaggaaaatgccagacagggccgttgggggggcaggggtgtgtgtggggggggaacgcggaagtctcgagggacagggaggggcggggccggtggggctggaaaggatactatcgggccagcagctctgtcacctcctccttggtcatgacgacgtgctcagggactagctgccgagagaggaagccaccaggcatcaccaagggctggtgagaccccacgtggctcccaggtgccaccacagcccctgcgccttcagacggacaagagccctgaaccccaccccgatccccggcactcagggagcccacccaccccaccctggctccacaggcgggggacggagtcacagctcctggggcttctgaggcagacgggctgggcacagccacctcctgctgggactcctcctgtcccagcactagggtccctccacactcccagcagtcccgattctacaggctggggtgggcccgggatctgcatttttttttttttttttttttttgagatggagtcttgctctgtctcccaggctggagtgcagtggcacaatctc[210 bp omitted]ggttcggctgctgcaggcccagggccaccctttgagaaccctgtcctccatgcactaataggaacacctgccctgggccccagatcccacatcttcctggccacccacaaacgctgcatctctgccggccccacgcaggcgggattccgcggcgcgcgcccacctcgtgctccgtgatgttgatgagcagctcctgctgcagaaactgctccaggatgtacttgggggccatgtcgaccagggactggaagagagcggctctaaggcacggcccggaggggcccagacaaccccaaccccatttcctgcctcaagctacctggggcttactcgtgtgccccaacaacacacccacgtcgtgaatcagaaaaccccaccgccagcccaggagccttcaacagcccgcccctccccagcctctctgctcatcgagagcctcatccagcagtgaagtggccgtggaaactcggatgtgtttccatccatcacacgcttccaggggcggccctcagagctggcagggcgacctcttccccatacaggggtgctgctctgtgtggctgcgtgaaccccacagctggtgggccagggactaaactgctctgctgactgcccgtcacagcacagcagcctggctccagagtgtccgacagacagacggggaacacggataggcccctggaggaccccgtgccgggcctcctctgcaagtccccctggacatcagctcaggataaagaacctccggctcctggaatctgcaccaggccgagggctggagcccacaggagctggcgagaggcacagtgccctccgccctgacgcccctcctgagagctgggggaggacggcggctgcctggggtggggcccatggacgcggtgggagggaggcggtcggggcttgccggacatcccggccacatcctccagggcaccctggctggcctggcccaaagcccaaggcacgtgggccgcctgtgggtactgcttgcgggaggaggctggggagggggagaggctggcggggtggggcaggggtgcccacctgcttggcggagggtgtcatgccctgctgcaccacgatgagagcccgtgtgatgttctcctcctgcatgcgctggcagtacaccttgatggtcttgatgcccaccttgggctcctctgcagacagagagtgtgctggcctgcacgagcctgggccctcgtggccctcgcccacccagagcccagagcacccaggttccagccccattccacacaggtgtctctcctgctcgggcctcggcttccgcgtttgcaaaacgaggcctgagttgcaggatcccaggacaggggaagagagggctgaaacctctcattcacccggagacagggacagggggctgacacccctcagtcacccagagaccagggagaagcagagaccttcgactctgagaggctcccaccctgggcagttctggggaggcgggtgactcagcaccaacctctccaacaagcagacctcacaccccaggacgctctctttaagaagcatcacctgaggccgggtgcggtggctcacacctgtaatcctagcactttgggaggctgaggcaggtggatcacttgaagtcaacagttctaaaccggcctggccaacatggtgaaacccggtctctattaacaatacaggatgggcgcggtggctcgcacctgtaatcccagcactttgggaggtcaaggtgggcagatcacgatgtcaggagatcgagaccaccctggctaacaaggtgaaatcccgtttctactaaaaatacaaaaaa[131 bp omitted]gtctcaaaaaaattaattaattaattaataaacaatacaaaaagaaaaagtagccaggtgagatggtgtatgcctgtaaacctagctttttgggaggctgaggtggaaggattgtttgaacctgggaggtggaggttgcagtgagctgagattgcgccactgcacactccagcctgggt[148 bp omitted]acctcatctctactaaaatgcaaagaaaaactagccaggcgtggtggtgggtgcctgtaatctcagctactcaagctgaggcaggagaatcgcttgaactcaggaggtggaggctgcagcaagccgagatggcaccactgcactccagcctgggcgacagattgagactctttttcaaaaaacaaaaacaaaaaaaaaacaaaaaaacccagcagcgtcaccaggtccggttggcagacgtgctccgtcaccccactgattaattctgggcgtggggctgcgcccctaaggcgcttgcaatcccccaaccgctgagggctttagagccatactagggaggcagacaggtgcggagacttccgcaaagcaggtgctgaaaccgagggtcccaggggtcctgggaaaagaggcccgagcacaagctcgagggacgagtaccggacgctgacaggggagagggggcatggggtgcggaggaatgggctggggcgggcaggggccgcagctcacaaggaggctgcgctgacccagacggggcctcctgggccaggccaagaagctggaagtgcacccaacggccaggatgggggagccaagggacactagggcaaaggacatggggggctgggggtgagtggggaggcccttgtgactctcctcgttggcaggaagagagaaggggactgagagggaaactagaaagaagctgagcatgagaggggtcagagatcaacggcatcacccacagcaaggaaggggaggggagttttcctcccagactgggcagagagacaaatgctgggcaccaggcgagtgggggtgggtgctagcgaccggctcctcggcaggtgctctggtggcttcaccggaactcccccgggacccgctgctcacctggaaagaacacaaacatctggtcggtggggtcatcgttgtgggccaccagcacggtgaggtccgtgcgccgcggccgcccctcactcggcttgtccccagattgggctttgaactcctccagggtctggtcaagctcgtcctgggtcaccagatagccacggtcgtggcacagctgcagagagaaagaaccagctgaccccagggcagagagaggaaggcggccaaagctcgtgacccggaagtcagacctgcggctgctgcagaggacagaggtgaacagcaaacgggatgaacactcactgtgtgctccatgacagccaccccggcccccacagcctcacaccacaggatgggaccagtatgatcctgagaggctcccagagatgtccagccttgaccaagaccgtctgtccacccagcctcacagaaacctggcagggagcaaagccctccaaaccactttgcagagctaccctaaaggcagggacaaaggcggggcgcggaggctcacgcccgtgatcccagtacttagggaggctgaggcaggagggttgctggaggccagttcaaggatgcagtgagctatgattgcaccactgcactgcagcctgggcgacagaatgaaaccctatctcttaaaaaaaaaaaatgacagggaccgaaacagatgtgacttcaggctgacaatgtttgaggatcggagaaagaagaatcaggctgcggggggcttcgctgaggacaagggcaaagggtgggaagcaagacaaagcaaaagctctcaaacggccccaatggctgaggcaataccctgaaccgcaggtcctcaggcctgtgcccggcttccaaaccggactcgacccagtggcctccatctgccccagaccccaaggcacgggttccgagctccacgtccccatcgaaagccccagctcgcccgctgcttcccaaccaccaactctgccagcctcggatgctgaagactccatggggttcaggacgcaaggacaaatagcgacgctgaatcacagagaagggcagagtctgggggcgccccccgtccccattcgcggcttcctcctcctctcgccgccacgcgcgccgcaccagcccaagccgcccacccacccctaagcaccgcacccagacgtctcgaaaccccctcccttccccgctgccggctcaggtcgggtccagcgcctggtatccccggcgacctctgggcctcccgtatcggcccggcccttcatcgctgctgctccgacgagagtacgaggagacgccgtgctcgaccccacctcgggcccctacacccgccgcccgcgcccccgcccccaacaccaggcgcggctcacctgcatgatggtcttgcggattttccagagccggtacgtctcctcctcgtcgtccatggcagcctccgccgccgccgccgctcgcaccccttctccgcgcgagaacccgcgcggactgcgcctgcgccgaatccgaatcaggccccctccgcctaaccccgccccgcgctggtctgtcgtcggcgaatgcctgaatgcagcaacgtctcggatcggcagcgccaagggcagcccgagccttacgagagcggcagttggctgagcgagtctctcgcctccgtagttctcgtgtgtctttggccgcacagcctctcgggagttgtagtttccgttcaactcccaccttggagcaacagtttagaatcccacgaggcgggggcgaagtgtgagcggggaaactgaggcctggatggggtcaaggggcagctcggctcctagggatggtctgggagcctagtgggaactctataaatatttgtgcatcaaactgtacagggtttcctccattggctcctggccaggtcagggttaattcccttgggcctcagtttccctacctgtgcaatggcaataaagtgtccctactttagacggttaactgagagtcttaggcatctctctaggtgcttattaagtcccctcacctctgtcctctcccctgagcgccaccagcctagcctgggtatctccccagcctagcctgggtatctccccaccccagactcttcctgtctttgcaaacctcctcacttccccaggttcacggagaaccccagcccaacacttcctgtgtgcaggctatcagtaacttattcagtgatgcattcgttaattcaacatttactcagcaacctacagtgatggtgaataaaacaggccaagtatcccttgcattcagataaagacaggatttagtaaaatataataaataacgtggccgggcgcggtggctcatgcctataatcccagcactttgggaggct[134 bp omitted]aaggcaggagaatctcgtgaacctgtaaggtggaggtttcagtgagccaagatcgtgccactgcactccagcctggacaacagagcaagactctgtctcaaaaataaaatgaaatgaaataaaataaaataaataacaacgttagaaagtgacaaagctacggaagaagaaagagcagggaggctaagtgacatggggagaatgggagaactgcagtatcacatggggaggtcagggaatacagtgaggatagattcaagcaaaaatcccattagcagtggtggctcatcactgtaatcccagcactttgggtggccgaggcaggcagagcatgagatcaggagttccagaccagcttggccaacatggtgaaaccctgtctctactaaaaatacaaaaattagccaggtttggtggtgggtgcctgtactcccagttactcgggaggctgaggcaggagaatcacttgaacccgggaggcggaggttgcagtgagccgagatcgcaccactgcactccagcctgggtgacagagcaagactccatcgagaaaaaaaaaaaaaaatcccattgggcgcgatagctcacacctgtaatcccagcactttgggaagctgagaggggaggatccctttgttgtagttttgtaatttttagttgtaagtcacggacttttttacactgatatttgagattctttttggggggctgtcaggggctactttttttttttttcctgacacggaatctcgctctgtcccccaggctggagtgcagtggcaggatctcggctcactgcaagctccacctcccgggttcacgccattcttctgcctc[211 bp omitted]cttttctttctcaccttgaggccaggagtttgagacaagcctaggcaacataggaagaccccatttcttttttgttgttgttgttgttttttgagaccgagtctcgctctgttgcccaggctggagtacagtggcataatctcagctcactgcagcctccgcctcctgggtttaaaggattctcctgccttggcctcccgagtagctgggattacaggcgtgagccaccacacctggctaatttttttgtatttttggtagagatggggtttcaccatgttagccaggctggtcttgaacttctgacctcagatcatctgcttgcctcggccttccgaagtgctgagattacaggcgtgagccaccgcacccggccaggaagaccccatttctacaaaaaaatttaaaaattagctgggcgtggtgggcgcacctgtagtcccagttactcgggaggctgaggtgggaagatctaggatcgcctgagcccagcggttgaggctgcagtgagctgtgattgcgccactgcactctagcctgggcgacagagcaagacactgtctccaaacaaacagaaaacaaacaaaaaccagaagaggagagggaggaaacctggggttgcctggggatagctgtatcaggcagacagcacagccaggatagaggctctggggctgtgcctcacctggagtgttcctggcagggaaggggcaggagggggtcagagggcaaggtggggcaggtcccatgaagccttgctggtcagggtaaaatgtctggagctgctgtgttgggaaatgactgttgggagccagggcagaagcaagagaccagggagggagtgggaaggcaaacttgccacaggttggggtggctccaactacggtaggggcaagcacagagcggggagggtgccacagggcgagaaaaagagggagaaagggaacaaagctgtccctgtgagcagtgaaaagaggggtgggagggtggaggcgtgtaggtcgaggtgagctctggagttcagggcaaggtctgggggatggacgtgcaggcagggtggccacgtggtgaagattagagccgggagcctggaccaggtcctgggagcagagcagagtccaggagagtaagtccagccctgctggtgttcagaagcccggagaaggaggggaggcagcagcaggaggggagggaggctcagcacagacactggagcagcccctgagctgcagacctggctgtgtgatctcaggcaggttactcaacctctctgtgcgtcccctctcccctcccttgtaaaacagggacaagaacagcacccacttcgtagggtaattggctaataattgcaatgtacacagagtggcgcctgacaccagcactgcataagtgttccctaaataggataaagggcaggaggttgccaggtctcctggaaacctggtgaggaaggtgtctaggggcagagggaagggagtggctatgtgatgccaccgccaagtcagcctgaggactgagcagggattcgcctagcagacattgcttgtgactcagggaagggggccagtgcctggcaggacggatttgagggaggagaggaattggagatgtggggcagatacatggggcggggagggtcaggagacggacaggcctcaggagtggattttatgacacaagaaagggcatctggagtaaagaccaagcagtgacctgcaaatctgggggcaggggtggactgagaggctgagcccaagccaggggcggcctggatgataacagcaaagccagaggcccggaagtcaggccatgatccacacacagggcaggtgaaaatgtaagatggtgcagccgctatagaaagcagtctggtcggccaggcgcagtggctcacgcctgtaatccaagcgctctgggaggctgaggcaggcggatcaactgaggtcaggggttcgagaccagcctggccaacatagtgaaaccccgtctctactgaaaataccaaaattagccgagcatggtggtgcaggcctgtaatcccagctacttgggaggccgagggaggagaatcgcttgaacctgggaggtggaggttgcagtgagccgagatcgtgccactgcactccagcttgggcaaaaagagtgaaactccatctcaaaaaaaaaaaaacaacaaacagtctggtggatcctcaaactgttacacaaagagtcaccatatgactcagcaattccactcctaggcatacacccaagagaaatgaaaacatacgcccacacaaacacttgtacggctttacaaactcaaaaagagaaaacagcccatagccgggcatggtggcgcatgcctgtaatctcagctattcaggaggctgagaaaggagaattgcttgaacctgggaggcggaggttgcagtgacctgagattgcgccactgcactccagcctgggtaacagagtgagactctgtctcaaaaaaaaaaaccccagatgtccatccacagatgaataaataaacacaatgtgatccctccacacactggaatatttctgagccatgaaaaggaatgatgaggctctgacacaggccacaatgtggatgtagcctgaggacctcatgctcagtgagagaagccaggcacaaaagaacacgcagtgtgtgatcccatttccatgaaatgtccaggacaggccaatccacagagacaggaggggatgtgtgtgtgccaggtcctaggggaggagatggagagtgaag[143 bp omitted]atggagaaaccctgtctctactaaaaatacaaaactaactgggtgtggtggcgcacgcctgtaatcccagctacttgggaggctgaggcaggagaatcgcttgaacctgggaggtggcagtgcagtgagctgagatcgtgccactgcactccagcctgggcaacaagagcgaaattctgtctcaagagaaaaaaaaaattctggaactagatagatagaggtgatggtctcataacattgtacacgtcctaaaaacactgaattgtacactttgaagtgttaaaatgttgaatttcatatgtattttgtttgaatttcaaaaactttttttttttttgagacagagtcttgctgtatccccccaggctggagtgcagtgacacgaactcggctcactgcaacctccacctccagggttcaagcaattctcctgcctcagcctcctgagtagctgggattacaggagcacggcaccactcccagctaatttttgtatttttagtggagatggggtttcccc[136 bp omitted]ttggccaggctggcctcaaactcctaacctcaggtgatccgcctgcttcggcctcccaaagtgctgggattacagatgtgagccaccgcacccagccaaaaagttttttttgagacggagagtctcgctctcttgcccaggctggagtgcggtggtgcgatctcggctcactgcaagctccgcctaccgggttcacaccattctcctgcctcagcctcccgagtagtagctgggactacaggagccctcgac[137 bp omitted]gcctggccaaaaagatcttaaaaaagaaatgaagccacaggacagcccctccccagtccttcctggagccaggggctgctctagaaagatatgtggcaacacagcttcctgcagggacactcaagaacttccgccctcacagggctggagccttgagaggtccccgagactccatttccccgttcgtgaaatggggacactctgggaaaagctgtgaagcccccagcacaaatctctcccagagcctggggccccgttctcagatccgaggtcgcgaccccgtgttttccccacttctgactttatcacaattggcaggaagtcaggaatgggatcaagtctctccgcggagctgtgggtgctgagctgtttttctggcaaccctgaaataaactcccatttcagtgcacatgtttgcaacaaacttaaggaaaacaacaccggcaaaattgcgaacagctgagccttcgcaagggcaagaacagagtcaccagtgtggccctgtcacccggcactgccagggcgggaggaaatgggggggtttcctgagaagtcagacaatgggagttgactccaagaactcagcctctaggggctgggcgggagcaaagccatgtgaacagacttatgcaagaccaggattcggccagccctgctcagggatccttgcttcactgcctctgccaccaaaccatccatgacgcctctgtgctgcatctggcaggcctgagtcgggggcagtggcgggggcaggctcatagcaccccccaagtcaacccggccctgagtctgtctctgaagaaatactcagtgcagggtcagaaaaggttaagacctt[132 bp omitted]gaaagcccgtatctactaaaaacacaaaaattagctgggcgtggtagcacatgcctgtaatcccagctactcaggagactgaggcaggagaatcacttgaacccggaaagcggaggttgcagtgagctgcgatggagccactgcactccagcctgggtgacagaccaagactcctcaaaaaaaaaaaaaaaaatccaaacccctgcctgtacaggggtcaaagtccaatcacggtgactcagttcccaagtatgagatgagtgtttctgttgccacatgtccaagccacgaagtgaaaaacagagttggaagccaagatgtggggcagtatgggctcgggtgtgcccataccttgtaatgttagaagtgtaagaaaaccctccagacttgtgtttattttctgagcacataccgcgcgtccctgcgtgggcagctgcccctgggggtgggagcccaggaaactccaggttctcagttaagtggtaactgtcttgatgactctcaggtctcagtgcccacattatacaagcggctcagcaaccagacccaggatggggagtcactgaccccctgcgcccatggcaggggtgagggtagggacacccccataagatggagctgtgatgagaagcaaacccaactcagtttggtttcatttacattaaaaaggcaaatcccttggccggatgcggtggctcacacctgtaatcccagcactctgggaggcct[136 bp omitted]gagtcaggagaatcgcttgaacccgggggctgggtggaggttgcagtgagctgagatagcgccactgcactccagcctgggcaaaagagcaaaaaaactgtgtctcggaaaaaaaaaaaaaaaaaaggcaaatcccggccgagcctttggctcacgcatgtgatcccagcacttttgggaagctgaggctggaggatcacttgaggtcagaagtttgagaccagcctaggcaacatagcgagacccccatgtctacaaaacaataattagccaggaatggtggatgagcctgttgtcccagctactcgggaagcagagacgggaggttcgcttgagcctgggaggtcgaggctgcagtgtgccctgatcgtgccactgcacgttagcctgggcaacacagcaagaccccgtgtcttaaaaaaaaaaaggtaaataagagttggggacacttttctgcgagttggagaaaccaaaccccctcgacgagtcttaagtagtattctcaggttgtctggcctgcggccgcgctgctgtcaaccagccggataactgcgctgcctcccgacgcgccgccagccaggccacggcctcctagacacaagcgagcatgcgcagtcgccaacaacaagtccgcacgtccggtcccgcccccccttccccgccttcttcccactccggcctcccattggctgacgtcggcgcgagcgctcaacaccgacgcgtctgaccaatgagcgctctggagggcgtggccgtgggaaaggaggcgcggaaagccgacgcgcgtccattggtcggctggacgaggggaggagccgctggctcccagccccgccgcgatgagcctcggccgcctttgccgcctactgaagccggcgctgctctgtggggctctggccgcgcctggcctggccgggaccatggtgagctagcgccgcggccgttgccggcccggtgaccgttggggcgggcgcgcgatccctgcctccgctcgccggcgtggggaaccctcaggctccagtgaccttggtggggggcgtctgggggctccccctccccacccccggccgggcacggacgcgggtgaccgtactgcgacgcgctccgcggccctccaggccgttgtaggcgcgcgggctggggtcggggaaggggaaggggttgttccacgcgcgcgggtcgtggtcggggaaggggccgtccaggccgttgcaggcgcgcgtgccggggccggggtcgggggtccaggcttgcagggggcggggtccgggacggctggggcggagctggaccgttgagggccacggcggggcgtctccgggccgagcggggctgctgcgcccgagcggttgggggcgcggagggctggaaatcccggatcacgcgcccccgggcgccgccccgcccccgcaccttggcctagcgcggtggcgtcacagtcgcgcagtcctgactacggcctccgggccctttgtccccgctagcggcgctcggggtgggggagccaggaggggcgggagacgggcgggtatgggccgcgcgggcgcaggctcccccgggcgccgcaggcagcggtgccagagccggggcaggcggcggccgcgagcccctcggcggcggaaggccccagcgtgcaggcgcaggagggcgcggcgccggcggaagaagccctgtccccgcagcttgcgaccggagatccacgaatgtcccaagtcccaggacccggtgcgcgcggggcccccacaccggctaatgtggcacattttggggttggaaccctctcccggcctccgggtctccggtaaaaccggaccagaagtacaagggggcgtgtgcgtttaaggaggaggagcgttcaggtcttcagggccgcagggcctcggtgtccccgccaccgacccgctcccgatcccttcctgcctcagggtcccgggctcagcctcccgtccacgctccctgctcagcttcctttgccttgcagtgcgcgtcccgggacgactggcgctgtgcgcgctccatgcacgagttttccgccaaggacatcgacgggcacatggttaacctggacaagtaccggtgggcgctcgcctggggtggggcgcggggtcgggccctgggagggggccgtgttcttctgcgctgacgccgccgatcctcgcaggggcttcgtgtgcatcgtcaccaacgtggcctcccagtgaggcaagaccgaagtaaactacactcagctcgtcgacctgcacgcccgatacgctgagtgtggtttgcggatcctggccttcccgtgtaaccagttcgggaagcaggtgggctgctgcgtccccggggcccgcagaggcgggtgggtgggggtcggggtgggctccagcctggagagggcctgggagtgtgcagggggcccggactgagggggtgccagcccccgactcactcacacaccttggccgccacaggagccagggagtaacgaagagatcaaagagttcgccgcgggctacaacgtcaaattcgatatgttcagcaagatctgcgtgaacggggacgacgcccacccgctgtggaagtggatgaagatccaacccaagggcaagggcatcctgggaaagtgcgtgacctctggggacagtacggctgctggggtgggggtgggggggctgctgggatgctcacacctccctggggcagaatggctcatggctcggggggcggttgcggggaggtgctgggactctcacatcgcgtggcctcctgggggtaagatggctcagggggacatagagggctgtggaggcagccagggatgcccacacctttgtggcctcctggggacaggatggctcgggggcctgtggggggctgttgggactctcacactgcatggcctcctggggtaagatggctctgggggggcttgggggcactgtggctgtggaggcagccggggaagctcacacccttgtggcctcctggagacaggacagcttggggactgtggggggctgctggggacgctcacgtccatgtgcttcttttccagtgccatcaagtggaacttcaccaaggtaagggggctgtggggggtaggggaccagcttcccctggccacagccgtggcccagatgggcagcggacaggaagggcagcctcagccccttgcaggggtggccccacagtttggacaccgtctctccacagttcctcatcgacaagaacggctgcgtggtgaagcgctacggacccatggaggagcccctggtaggtcctctctagggagcccgcttgaggctcgggggcttgggaggtagctgccctaacccagctttcctccccgacaggtgatagagaaggacctgccccactatttctagctccacaagtgtgtggccccgcccgagcccctgcccacgcccttggagccttccaccggcactcatgacggcctgcctgcaaacctgctggtggggcagacccgaaaatccagcgtgcaccccgccggaggaaggtcccatggcctgctgggcttggctcggcgcccccacccctggctaccttgtgggaataaacagacaaattagcctgctggatctttctgcgtaggggcttggggggcccttttgccaggggcccctccatgtcagggccagttgccgtcagctgccaggctgggggtgccatggaggtggcgtgttgttgccccctcttcctccaggctcggggggctgtgctggctgcagtgctggggtgcagtgagatctgggcccgttggacacccagccctggctcttaatccgtgcagccccacctgctgtgcacaggcagggcctggtgtagtgccgagtcttggaggagataattctaagtggctgtgcttcctggccccgggccttaactgttaggaggtggctactggggcctcccctggccaggaagcagaagtgcagaggcccgaggaacagcgtggccctggtgctggggatgggttgggcacccacaccggcccttggggcctcacctggctggggggtgtgggggtggctgggtggttactgtttgcacagagtccctccgtgagggctggggatggacaggccaggaggggctggtagagcagtaccagccaccgttcatgggacccgggggctgtctggacacggcctggctgcccacctgcacagctagagggactgcagcctgccagggtggctgatcccagctgcccccactgggggtctgtggaatggacggtccatggcacctgccccagacactgggttgagaggtctgtctctcccagccctcgtcccctctcatccacatggggccagcacaggcagtgggcagaaaggcctggtaaccaggagagcctggggggatgcccacacacccctgcccttccctccctgtcccacaggctgaggagcagactccgtgggaagtaggcaaaaggcacatatatttaaaaaagtcctttacatatgtacatcagaacttgctataaatacatagaaaccgcaggcgccaccctgccagctccgcggcctggggcctgggagaggtgagcgggcaataacttaggggtcagggaagggctgggggagggagaattgcatatattagcaggggtctgccccacggagcccccgagacgcggggccctgagcacctggggtttcctgagtttctagctcttgggaccacccggtttcacggatttcaagggtttgggcccactgagcccttgtgggtgcccagtcccagagcagccacccggagccccttcctacttgggaggagaggcacagagagggccctgccacgccccggcccccagctgtcctgagtgggccccgccagggctgaccaggtgggggcccgggtcgggcgctgaaggcactgcggccagggcctagggctcctctgagcagtggtcaggggaccttggccctgctccccaccgctgctcctaggggagaaacggtccctgtgtcttggggcatgtttcgcctaaaggcgtgtcagagaggagcctgggcgccggggaagggtgggctgaactggatcacgctctgccgctcgggaccaccgcccgccgcgccccccgcccccgcgccctcccccagcgcgccctcggagggcggccccgcgtgcagcgagcgcagcatgtcctccagcacctccttgaagttgatgtcgcagccctggtgcgcgagggccgcagggtcggcctgggcgtcgggggtgcccagcggcacgacgccggggccggcgtccagggacagcggcgccgggaaagagaagtgcgggggcggcgggaaggcctcggccggggggctgtaggtgaggtccagcacctctccggggccgcaaggcagcgccagcgggcgcggggcgggcggggcggggcagcccagggcgggcgcctgcctgcgcttcacgtccgcatccatcagccgcagctcctgcagcacccggcgcacgcagccctcggggatcttgatgcctgcgggcagagcgtcggggtcagggccggcgctgggggctcgggccttcccggggcgcccgccgcccactcacccacttgcttcttcctgtccttggtcttcagccgcacgatctgcaggtagctgctgctgctgacgtcggccatgacggcggcgatgcggccccacacgcgcagcagcgcgccgcacagcatgtagtggtgccgcagccgcagcccctgcaggcagtccttaccctcctgcgccagccggcagtgccggttcctgcggacgagacgggtcgtctcggctcaggcgggtcccaggggcccgcaggctccccaggtgccctgagatctcccgcctcctctcagggtctcgggagcccccgatccccgcctgggtcgccgccatctgccggtttccccctggtccccggcccgccctcaccaggcgctgtggctgcagtgcgtcagcgacaaagcgtagccactctcccagggctccttggcctcctccgcggtgacctagggacacagggccgcatgagcctgggcggggtcagggccggcaacccgagcgaaagctgcgcccggcggccgcctacccggtggaacttgcggcggaggctgtccagggcctccagctggctctgccggccgatgttgggcttgtacaccgtgaagaactggccgcggttctgctccgccagcaggcagctgggcttgttaccgcggacctgcggaggggggcgttgaggccgcgccccggtccgccccccgcgggccctcctctgggggggtaaccccgcccgaccccaccttgtaggagaggtagaagccgtcataggggcccgtcagcgccagcgacttggcaaaggcgtcctcccacttcaggccgcggtccacgctgatctgccacggcacggggtgggggggtgtgagtgtggtgggggcggggtgggcagagtgtgaggggctgtggggcttcctgctgaccttgtagaagaccacctgcccgtcctgcgggtgcccgggagccaggaacacctgctggctctcctcgtagatctcctcgataccgggagcaaggtctaggggggcgggtggagggtaagtggtgtccaggcctgggactgtgggctggggccagggtcagtcccgtagccggggcgcaccctagagacgaccccccgagagcacaggagagggtgtcctggatcctggcctgacctggcccagcgtggggatggtgcacgtgggccccaacctggcaaccgctcaggtcctaggtaaccccgagcaggctgtgggggatcgtgggagcctgggggccgctcaggtcctatgtaaccccgagcaggctgtgggggatcgtgggagcctgggggccgctcagatcctaggtaaccccaagcaggctgtgaggagattgtaggagcctgggggctgctcaggtgctgggtgaccccaagcaggctgtgggggatcgtgggagcctggttggctgcggcactgctcatgagtgaagtagccatggcccggacccgaccctcatctggacacagggaagtggtcctgatggacaggcctggccccatgaggctggaagcacaggctcgccggcctttcgttcacaacaatgtagcaggtgccccgtgaagcctggggatgagcatggtgggcagcgtgcaccagcctgggcaccttccagagacgtgcacggtgatcccacgagccctgtgcctgcatccgcccagtctcacccagtaccctcgctcacccaggatgcatggcgcttccacgagccccttgcccacctaggccctcgccgtgctcacccacaatgcacggtgttcccacgagccccgagcccacctgggatgcccggcgttcccacgagcccctcgcccacccgggatgcacggtgttcccacgagcccctcgcccacccgggatgcccggtgttcccacgagccccgagcccacccaggatgcatggcgttcccacgagccccgcacccacacccacccacaccacaccccggcacctgtgctcacccaggatgcccatgtcgtatttgccctcccgcttgtccatctcgatgaggtggtcgaaggtgtctgagaagtactggaacagggcgttctgcttgtgcacctccagccccaggatgcggttcaggaacttggtgatggaacagtctggtaggggagggagccaagcctcaggctgcgctgggaatccctctccctgctttgctcaccacccgaggccaaggttgcatgagatgagagacaggagcgcctctgggcctgggtgtggggcactcacccttctccacgtccaggcagccattccgggactcccggccaccaatgcccacagacagcaggccctgcttcatgtctgcggggagaggggcctcacatgctggtcttcccacccctgcccctccctcgaagcccctagctccttttccagagaccagcagctccctggggggctggggagcagctgcagcctagggccagggccagggccaggagcggagccttttgcctgacttacaggagtgagaacagcatgttcttggggagtaaacccaaaccccaggcccctcagctgccctggaaacccacccggcagctgctgggggccgccttggctccctttgccttcacagccctctctgtccgtgtgtggggaggggtcactcaacacacaaccggcctacaaagcctgctgccccagctgctctggagcccagtgctctgcaacccctgcccctcccaggaagacccccaccagcccagcttaccccggaagaaggtggggacccctccagggtatccctggggcacaggcactttgttctcagtctggctcaggatggtggtgaggacacagtgcagggcccgggtgccatactagggggagaaggtgactcggggaggaggcccagggaggaggctggctttccctggacccctgcctccccagaaccccaccctcccctaggcccctggaccctgccctcccctagactcctagaccccacctcccccagctctcagccacctcctccccgggggtcctagactgggtcctcccccagacccctggatgccacctccctgagcccctagaagcccccttcccccctgggggtcctagacccggccctcctccagaccactgagccccacgttctccagcccccatctaccccctcccccaggctcttagatccggccctccctagacccctgcccctgccccgccccccaaccctgccttccctgcagtaccttgttctcaaagttgtacttgctgaggtcacgggactccgtggcgcggcggtctccgtgggtcagggccccctgccaggggtggggaggccatcagttggtcacctggggtctggcctctagcaccccacaaagctttggagagccttcctgggcctgtccctggttctcagccccacccccacctgctcaccagactctccaggcgcttggccacgatggaggcgaaccggcgctccccggccagctccgagatgaggaagacatactctggcgcggagacctggttggaccggtgggtgcggcctgggggcagagctgctctcagggcccggccaggcgggggcggggccgagaccatgttgggggcggggccaggcagcgctgggggcggggccggactcaccgaactgctggatggcgcggtcggcgctccacggcagctccaaggtcatgtgcacgcggcgccgctggttctggacacggcggtcggcttggagggagacacccgagctggaggcctccgagatgatggccacgagctagggggaaagaaggggccgggacacggttggtgcaaggcccgccccagcgttgccgccacctcctcacccactaggcccccgctccaggtcaccaggacgtcccggggcagcgagaggcctgcggggcgcggacaccacccgccacacggccactcgcgcccgcacctggcacacacacactccagaagtgcgcgggtccacagtccccggggacccttgggcccctctgtgcctcttgggtcccgtgggccgcgcccagtgcactgcagccccgcaccttctcgccgctcatgaagcgctgcttctccctgaggttcacgtggtcgatggacagaccctgctctgcccgcgactcgaaggccaccgtcccgtcgggcctggacaccacgcggcctttcctgccggtcatctgcagccgagacagggacaaaaccggccgtcagtgttgtggcctcgcaggagtctggccacccgtgtctcagcttccctatgtcctacagtggtcatgggctcccagctgtgcacgggaggtgggggtgctgggaaagggagggcgggactgctggacccaggcgatgtgtgcctgtccaaggcctggtattatcagccagccggcgccacgaagtgaaaaagtgaagctgggcgggggcagggagtaggaggccgcagaaccaggcccaggggcttgtgtcctggccctgggcaccccaaggggtgcgttcaggcaacgatctaagcagaggcctgcgcaggccaggctgggggatctggggcttagagggatggggcaggccgtccacaggaggtcgtggcctcccgggccgagctggacagcacgctgctgccccagggctccccaaacgccccctcctcgcagggccgcggagacgcagagtgaccagcaggggccaccagagctgcacacagcctgcgtgaagccccacccactgcccatgccccgcccaccacactccagctgccacgtcccacccacctccgccacccgctgggggccgcccagctggtcgatgagctcgtccagggtgttgactggcagttcccggcccagccgccgcactttgtccagcagatcctgcttcagccgctccacccgctccaggaccccggggccatgcgggtctctctgcaggaggcacaggggtcctagggaggaggtggagggtcagggcaggacatgttggctgccttctagggcccacctaactcaaggctggcccctggagggcaaggacaaggggcccggggcaaccctgagggacggcagggtggcggggaagcccggcaccgtggcccaggactgcttttctgcacttgtctccctgagaccagctggggcgagactaagcctcctgtcgcggaccaaacactgtgacctcactgcctccacaggggtagggactgcccagccccaagccccagctctgcctctgaccagtggtataacccctgacctcccctctctgggcctcagtttcccccatctgtaaagtgggcaccatagcagcagctgggctcaggtgggctggactgagggctacaacctggggtgggtggtgaccgccaggaggccgggggagcctcaggctggaatcctgacccagaggtggctgctcagcctggactggaatcctgacccacaggtggctggccagcctgggcaagccctcaccccggtcgtcactggggagcccgactgcatcaacgatgacaacgtcgtcatccaccagggactcgggggaggagttgaagtcgctgtccaggccagggtccgactccgtgctgctgtcgtcactgatgcggatgacgcccgctgtctcgcacgccagccggggggctttggccccgcgtccccgaggtcgccctgcagggaaggacagggtcaccgagggccagaccgcagcaaggtggaggagcaggtggaggagacgcagcaggacagagcaaggccagtggtccgagctggggaggtccatccgagaaccccctgcctctgggcaagcagctcagctgttctccagggacgccctctagggaaccccgtgccctgtggccaggagggtacggtgtggggggccatattttatttatttattttcttttgagacggagtcttactctgtcgccaggctggagaacggtggcatctcactgcactctctgcctcctggattcaagcgattctcctgcctcagcctcctgagtaggtgggattacaggcgcccaccaccacgcctggctaatcttttgtattttagtagagatggggtttcaccatgttggccaggatggtgtcgatctcctgacctcgtgatccacctgcctcagcctcccaaagtgctgggattataggcgtgaaccaccacgcctggcttatttatttatttttgagatggagtttcactctgttgcccaggctggagtgcagtggtgcgatctcagctcactgcaacctccacctcccgggttcaagcaattcccctgcctcagcctcctgagcagctggtattacaagcatgcaccaccacacctggctaatttttctatttttagtagagatggagtttcaccatgttggccaggctggtctcaaactcctggcctcaggtgatttgcccgcctcagccttccaaagtgctgggattacaacaggcgtgacccactgcacctagccaatattttatttttattaatttttttgagacaagagttttttctgtcacccaagttggagtgcagtggcatgatctcggctcactgcaatctccacctctcaggttcaagcgattcccctgcctcagcctcccaagtagctgggattataggcgtccaccaccacgcccagctaatttttgtatttttagtaga[154 bp omitted]aggcctggccagtatggtggacacgcggggtgcctggggaggccacacaccagacttcgacaggcagctctgggcttccctgtgacagaagcctgggggttatcaatgggctccccaagggaccgtggagaccctgaaaacggaaggtgggaggggtctcgctcagcacccgcgtccgtgtcccgccccccgggtctcgctcggcacccacgtctgtgtccttcaggctgtctgttgcttcctcttccctaagcgttccatggcagggtccacgcaagacctgccactggcagcggagccttgagcctgcctggcacggacaggacctgcatttggctgagtggacgggggagtgggggaagcagggagcgaccagccagcccccggggggagaaagcagaggggcaggggtgggtggggccatggggggcagggcttacgtttccgcttgctgcccgctcctctgtcccgctttctcttggtggacggaaagtgcttctgaattagcgacaggaacacgcctctgaaagtgagacgcggagtttattctcacacgaggagctgaggccaggcggggttgctctccaggagctggacgcacccctgggtccctgtgggggtcccggacaggaccgggcctgggcagagggtctcctgtgtggagtgggctggggaggactgggggctgcctgtgagctctcctctggcctcctggtgtcacagggccacctcggccaccaggcttcccccgctctgaggaatgtggccggatatgatgatggctcccaggacaggggcagggggcagggtgaaggggtagctgggggcattggggagctccgacccccaggcaatggggggatctaggggggctgctgtgaccctcccggggcattctcaaccaacaggggagaggctggggcttcagacagctgggagggccagcccctaaaatccacagcccccttgttaaaacggcacagatgcaggaagcctccttctgagacccctggagaccatgtcccaaaccttccaggcccaccatgcctggggtccacctccaagcctctgctttagacctggagcagcggtgaaggcctctgtggctgaggctgggggcccagcaaagcccaccccagcacctcctgctgctggggccaaggggcagggtcaggccacaggtggccacagagaggggtggccatgagcgcaggaagcccacagtcctgtccccaccgtgacacttactcagcggccgagacgaagcagttgaggtgcccatcgttctcccccagcacctcccgcgtgcgcgcctcgcccgtggactgcagcccgatgaccacgcactgtgggacggcagaggactgtgagccaccagccctgctgtggggcctctgtggggccagaacctgccaggcctggggtgatggccacatccctcactctgctgctgtgctcgcctccccaggaggggccacggcccccctacaacacacactgctgggtgggggtctgccggctgcctgtctcgggatggtgagctgcccactgtgtggtcacactccgctgttctgacaccctggctggctctgattggaagacggacatccgggcgtctctcacccaccagggtgcagcccccgcccacgtctggggaggggccaggaaggacctggaagaagagcagcctccgcccctgcaggcccggccgccctcagccctcgaaggccgcagccgctcaccttgtctcgcgccagctcctctcgggccagctccaccagccggcgcaccttggctgcgatgcacagatacttgaagaagcgctggtgtgccgaccagaactggccccacagggacttgcgcgactccaggccgatccagtcggccgcctgctggaacacgttcagggcctcggcccactgcaatgacacgtcacaaggcgcccctgagctgtggctcctggctcccgacccgggccccggcccacctgccgccagccctgggcaaggcatccccacgccaggtggaatttagggcaggatgggggtgctgggggtgtgcactgtaagaggcactgcctctacctgtacggcaaaaacctgaaaaaccaaaacactcgtggtggggaagccgtgctgcaaactgcacagactccgcgcccgcggcaaacaggctcagctccttccaagaacacagggtgctcgcagccacgcctctcttgctttggaccagggtctcacccaggtgtgatcctgtccaggggacactgggcatgtctggggctggctgtggtggtcaggtttgggggctggtcccggcatgactgggtgggctgggttagggtggctgggactctggccacggatgctgctccataccccaaagtgctcaggacggccccaccccggagagcaacccggccctgggggttacgggagatgctggttgtgtcacctaaagaaacgagtgaagaggctgggtgtggtggctcacgcctgtaatcacagcactttgggaggctgaggcggtcagatcgcctgagctcaggagtttgagaccaaccagcctgaccaacatggagaaatcctgtctctaccaaaaatataaaattggccgggctggtggcacatgcctgtaaccccagctacgcgggaggctgaggcaggagaattgcttgaatctggtaggcggaggttgcggtgagccaagatcgtgccattgcactccagcctgggcaacaagagtggaaaccccgtctcaaaaaataaaaaaaaaaaaccatcgaacatacagggctgttgggcgtgagggggagaaaacaggacctgtccaaacatggagggaacgaccaagccacatggcccacagcaatgtggatgctgaacacggctaccaactgccagctgtgggccaggacctgggggcaaagggcttgggcaccacaggaaggggggcggtggtttggtcccatccctcgttatcacagccacataaaaaccccagtgatggccgggcacgtggctcacgcctgtcatcccagcactgtgggaggccgaggcgggcagatcacttgcggtcaggagtttgaaaccaacctggccaacatggagaaacaccgttctctaccaaaaaatacacaaaattagctgggtgtggaggcgggcacctgtaactccagctactcgagaggctgaggggggagaatcgcttaaacccaagaggcagaggttgcagtgaactgagatcacaccacagcactccagcctagatgacagcacgagactgtctcaaaaaaacaacaaaaaaaaaaccccaggacaggacagggcgggccgtcacctgatgacgcctgtggcatctgcaaggccacgggggagcaatttcacccgggaaacgcacaggggtccccgggtcgggtgcgcaggctcaccagcagggccgcgcggttgtagacgcactcgaaggctggggccagcgggatctcctcgatgcggaaggtgacgccggagaagctgagctggcgtgcgatgtacatgccgctgaccttcatgtccatggccacgatctccatggcgccaacgcccctgcggatggacacagcccccgtgagcacggccagagcccgtggggatggagccactcggagcgcgaggcagagccagtcgcagagagggcggggtcggcaggagcagagccctggcggccactgaggcagttggcagctgagcctggcggggacggggcaggaagggctgcggaggggctggcttccctgggagtgctgggcagcccgaggcagtgaaacgagcgacccacattcagcacctctgggtgctggggaagcacacgtggcagtgccaggccttgggctgatgggcctgaggcctcctccccaccccccgccgcccctccacgtgggtgagaagggcactcacctcttctcgatggcgtgcaggaactcctcaaagttccggaagggtgtgccctcgccccagatacccaagcggctcatgtagatcatgttccgaggctcagaggcacctgtggggggaagctgccgtcagctccccaacccgggagggcccagaggccgcgtcaggggacgactaagttgggaccacccgacgaggggccctgcggggttggagccatgggcctgaagagagccagcgtggccttgggacaggcgcagaggtgccccagtgtccgaggaggagcagggtgcagacggaggctgagtacgcgtgtgggataccccttcgcggggacagccaggcagaaagacgctgctgcgggtgggtcacgtgggatccgcaccgccccacctgtggcgctggcgtagaccacgcgggccaggggcagcttgttctgcaggtctagcacagccttgcccatcttggtggagccggcattcttggctttgtgacactcgtcgaacacgatctgaggcacacgtgggttaaggagtattctgaaggacgggggcgaccccaggagcccaggtcctgaccacccaagaccccaccttcctggtggggggcaaacgcctgtgcggctgagaactccacgagggaagcccaggtcggagtggcagccggctaccatggggggcgggcgggcaggcggcccccacacgaccattagatgggtgtggcctgggatggctcctcccagactctaaacaacacacaccgaggatggggcctccggcgaggaagggtgggatccctaaaccatgatatcgcaggacgttgccatcggaggaggatacctggaacctgttttcttttttgtttgtttttttgagacagggtcttgctctgtcacccacgctggagtgcagtgatacaatgtcagctcactgcaacctctgcctctcagattcaagtgattctcctgcttcagcctcccaaggagctgggactacaggtgtgtgccaccaccacaaccggctaatttttgtagttttggtagagacggggttggccgtttggttggccagataatctcaaactcctgacctcaagtgacctgcctgcctcagcctcccaaagtgctgggattacaggtgtgagccgtgcccagccctaattctttgtttttttttgagacgaagtctcgctctgtcactaggctggaatgcagcggcgcgatctcagctcactgcaacctccgactccctggttcaagcgattctcctgcctcagcctcctgagtagctgggattacaagtgtgcgccaccacgcccgggtaatttttgtattttcagtagagacggggtttcaccatattggtcaagacagtctggaactctttttttttttagatgagacacagtctcgctctgtcgcctgggctggagagcagtggggcaatctcggctcactgccacctctgcctcctgggttcaagcgattctcctgcctcagcctcccgggtagctgggattacaggtgcgcaccaccacgcccagctaacttttgtatttttagtacagacgtggtttcaccatgttgtccaggtggtctcgaactcctgacctcgtgattcgcctgcctcggcctcccaaagtgctgggattacaagcgtgagccactgcacccggccaggttcttaatattttaagacgaaagaaagccaagttccaggaaagcagtctgaggaaggaaaactgggagaatacaaattaaacggccggccctgccgccacgtagcagctcagcgaggtatgatctcagggttatcgctatttcgtagattgttgcacatagattgttcagccgggtgcgaagacaccagcagtctcccgttctgtttctggccagtctgaatgttctgtgtctcggcgttaactgaacagcaaagccatggccatgtcctgtgcatgaagtggatgctgcaggccaacgtccctcccttatctgagcctgtgctcccaacaccccaacacccaaggtgcaccctgcagggccgagcaccagggctgagcctggccaaggggtgccctgccgtgcctttgctgctaactgtcctgggtctcctgtgggggagcccctccgaaccgcagcctgccgacgagagccctgggatgctggggagtgaactgtgcccaccacactatcagctggggttggcaccttcctgacttggggagcagctcagtggccaccctctgcccacggcatcatggcaaacatcaggaccacatctatggtcactcatcccacttatcagaaccaagaaaccaagccggagccctgtggtgaatgatgatggtcacttgtgtggtacccacagggccagcctcccaggaccagaaaagtcttctatccggagtcctaaaccctgagcaaagctgggggctgggtggccacatccagggtagtgagctccagtggcctccagcccttccccagccccacccctccgctcctaccctctcccatcctgccctcctctcccctgactcccacccctcctctcccactcctccatcctccttttccctccgaccccctaatccagccctcccctcccgattgcccccagcaggatacgacgccctcgaaggcctccccacaccagtccaggatctgccggaggcgagtgcggtgctggccgccggcctggctctccccaatcagggcggagtaggtggcgaagaggacgccctctgaggtagtggtgtcaccgtacttgatctggggatgcacagaacaggtgtggaatggggccccggctcagcaggctctggacctgggtctccctatctgtaagggtgctgggcagagcctgccctggctgctggcccacccagctgagcagcccccactttgcagggcacggtccccaccttgccccctactttgccgagcacagcccctaccttgctgagcgcgtgcaccgcgatgcccgtggcttcgatgtcccgcaggtcgcgctccgcatcgtacttgaggtcgttggagacgctgaacctgcggggtgggggcgtcaggcgcgcccacccttccccctcgccccccgcttccgccccccacccccgctcccgccccctgccccaggcagggcctcaccacaatgctttcttccggccgcgcaggtggttctccaggatgactccggccaccgtccggcctttgcccacgccggccccatcgccgatgagaaagcccgcgcgctgcccgctggggagcaggacctcgtgttgctgttgccggagagcaggcgtcagggcctgggggtgctggcccggcccctccccaggggcctcgcggacacaggctgggctgggttggggacatgcggtcacctggcaggcgtaggtgatggcctctagctgcagggcagacagggccccgctgtccgagggcagggccagggtgtaggtgatgtctgggggtgggacgctggacagtgtgctggtctccaccacgcggtctgggtgctgcttcccgatcttggctggaggagcaaggacggagggcaaggtaaagggtatggccaaggggtgaccagggccggttatggcacgctgggcgggtctggggcgtggccagagctggcggggcagtttgggggcgtggccaggtcccgttgggcgggtcatgggcgtggccaggaatgcctgggtggaggagtggtcagggctggccgggtcgggggtgtggccgcggcctgctgggttggttgggggcgtggccagcggcttgcaggaggggcaaatgcataaaaatcctcccagtgcctctgaggttcctttccacttctcccctctgcgaaccccggttttgtataagcctggattgtagaacctgtccccgggctctccggccctccctgaagcttcacattccctctgtgggctgtgcgggcggtggtcacctgcagggtctcggtcccacaaaagggtttgaacctgtcccagggctgggtgcagccgggccactcacacttggacggcacgtagtcggcgtaggtctctgtgtgccccagctcctccgcctcctcctcctcagcctcgtcctcctcctctggctggctctgcacactctgctcctgcgtgcgtggcgggagctcagcggagactgcaggcctgagcggccgcgggcactgggctcccccaggggcaggggccaggctgaccatgggcagctgagtgacccaggggtgggagacggctctgtctgcccctgcagcaaggtgctcccccagggcctccatctcctcagctataaaatgggcactcccagcttctaggccagccaagcgctccccacaatggagatgcctgtgctgagccctctccttaggtcccatgagagggcaggggagggagctctcggctgggcccagctcacctggtagctgacgagaagcggggtgctgtgggagggcagaaagtcctcgaagcctgcaaacggcctgctgagctggaacagctggaaggggagcaggatgtcagcccgggccagacgggacaggtcacagctggtgggccctcgcagcctggccaccagagggaggctccccactgccccgtcctcgcctccccatcctcgctccccagggccctgggtcttgctctcctgctgttctcagggtgaccctggtgcctcccaagcctccccagtgggcacctccctggggcctaaggctcgctcctcctggccagcacctggctgccttctcactgatggccagtgtgcctgcctggagtgcccgggaggaaggtgcccggctagttctgacagacaacacagcttggtcccgcgggagctgccaggaaggctgtggacaggggtctgacaggagagacccactgtgtgccagccccatgcagtgcaggaggccctcgggggcctgggagacaaggggttgggagctccctgtcgagggggaagaggagacagaggcagtgggggcgggcgggcctgggccttgtccctcacccgatggctcccagcacacagggtgggtggcccagggcagccctgcactctccaagaacccccgtgggtgcagtccctgaggcccctcgagggcagcacctcctctgtgagagatggggcaaggatgcctgccactgtagtgaccagagaacacatcccactgcggccccaccctggggagaaggactgcccggagcctcatgcagattcaccagggtgggcagtgacactgtcctcggggagctgaccccaggccttggcagacaggtgtgctgggcctctggatgagtctgtggcccacccaggggtctccgaactgactgggcgtgtaaagcctgtgaacgggtgggtcggggggtggtgtggcccgtcgtcatgcccactgtccagacgccaacactgagacagtgtggaccccgggacggatggctgggggatggtagggtccaaactagggtctgtgtgattctggaatatatccactcttaaaaagcaaaaatcctaacagtaatacgagccataaaaaacgtaagcatggtcagggtacagtggctcacacccgtaaatcccagcactttgggaggccaaggcctcccagagtggaggtcaggatttcgagaccagcctggccagcatgctgaaaccccgtctctactaaagatacaaaaaaaaaaaaattagccaggtgtggtggtgggcgcctgtaatctcagctgatcaggaggctgaggcaggagaatcgcttaaacccaggaggcagaggttgcagtgagctgagatcacgccattgtactccagcctgggtgacagggcgagactccatctcaaaaaaaaaaaaaaaaaaaaagtgagcgtgggccgggcatggtggctcacgcctgtaatcccagcacttcgggaggccaagataggtggatcacctgaggttgggagttcaagaccagcctgaccaaaatggataaaccccatctctactaaaaatacaaaattagccaggcacgatggtacatgcctgtaatctcagctactagggaggctgaggaggcaggagaatctcttgaacctgggaggtggagggtgcagtgagctgagatcgcaccactgcactccagcctgggcgacaagagcgagagactctgtcttaaaaaaagaaaaaaaaaagtgtgaagaattggaaaggggagaatcccgccgggtgcgtggctcaggcctgtgggaggcagaggcagaacgggcgagatcttttggggccagggttccagaccagcctggacaacatgataaaatcctatctctacaaaaaatacaaaaattagccaggcgtggtgtcgtgtgtctatggacccagctactcgagaggctgaggcaggaggatcgctttaacccagaaggtcgaggctgaaatgggctgaggttgcgccaccacactccagcctgggcgacagagtgagatcccgtctcaaaataaataagtaaataaataaataagagcatctcttctagacccggtcccccccttgaactccaacgtcctgagacgggtgaggtttccgcccaagcctgcctgagcccgggccgggttctcggcagtgtgtgggagccaccaggctagtgatgctaatgaactgagtccacagcttctgcattttctaacactaggaacactcctgagggtttttaaagaaagtggaagcgtggcacaggaaggttagaaacctatactcagttgccctctccttttttttttaagttaacaaaacacaaaaaaacagacgccacgcaggttcctggaaggctgagtcaccattcccggtggggctggcgggcattgggtttcagatgccctcgtgccggccacagcaggccggtcaggccctggcttctttcctcacgccctgctgaggacctgggagctagctgggagggcacgggccccgggctgggtgaaatgctctgctgggcccttgtgccagagggaccaagcctgagccgcccaccatggctgcggggtgccctgatgcttcctgagccgcccaccgtgagccacccaccgtggctgcggggtgccctgatgcttcctgcctgggcccccaagcccgtgagttctgctgcccgggttgccccttcctgagggcccgggagagcggcctatgggtgtgagcccaccactgtgccgggagcgtgcggaggctggcatgggccctcaccggaaggcgctcagtcccagagacatgtccaacgtctgctcccaaagtctagaagcttctctcgtggacaggcccggattggggaagggacttgccaggcctggctcccagccatgcctccctcaccagacacctccactgagtcgcactggggcacggctagaggctaggcccgaagaacctgggggccctgctgccctacaacccctgctctaggcctggcccacccaggtccttcaggagcttcttggaggcaaaccccagcccctcagcccccacggacaatgtccagctccccaccctgggacaggatccaccaacctcgccctctcagctccccactagcggggacacggccactgctgacccaggcaccatggggctggatgccaccacaggtgctgttcctctgcctggacagccacattgcctgggcccgctgggcgctgcctctccagggggcccttcctgaccacgcttctctgtcccgtcaccttcctgtgcttctctagaccagggactccccgggtgcggtggacacggggcagggtccctctcaggtggggccataatgggcactgcagggcgctgggcagcatcctggccccccccaactccatgccaggagcaccgcccagatgtggtagccacagatgtcctggacgtcgccttctcctattcaggacacaagaggaccctcaactaaccacctcatccatggccacagatggcgccgacagtgacaggcacagccattggcacgcagagtgggggagactgagacctcactggaccgtgtgggtcccgggctggggaggccacgctggtgggtcggggctggctgggggcaccgggcgcactgaccttatcgtgggtggagggggcagggttatcgtcccagatggtggacacctggttgaggctgtcagccggcaggaagtcgggcgtgtccacgatgtccgacagggagtccacggacgaggagaagatggagatgttggagaagtcctcaaaataggaggagtcctggaagacaaggccaggcccggtgagggtggtacgggagacaccaaggcccctccacgcactggagcacgtggggatgggagacaccacggccctccacacactggagcatgtgggaatgggagacaccacggccctcccaggttcaagcaattctcctgcctcatcctcccaagtagcagggattacaggtgtgcgccaccatgcccagctaatttttttgtatttttactagggacggggtttcaccatgttggccagcctggttttgaactcctgacctcaagtgatctgcctgcttcggcatccaaaagtgttgggattacaggcgtgagccaccatgtgacagagcgagagagtgagactccgtctcaaaaaagaaaaaaataaacaagcaatgggtgagaaacaccaaccctcagggccacgcaggacggcgtctgacttctgcagcacctgaagggcagcaatgctgcaggaactctgagcagctcgggtctggggtgagcctggtgccatgccctgtgccggaggcaggggcgggggcagccacgcccagaggtggggctcgccatggggatgacacacacacacgcgctgcccagtgaaggagatgtatgtacatcatttcatttttttttttttgagacggattcttacactgtcgcccgggctggagtgcaatggtgtgatctcgtctcactgcaccctctgcctcccaggtgcaagcgattctcctgcctc[224 bp omitted]caaggtggaagattgcttgagtccaggagttcaagattcgcctggacaatatggcaaaaccccatttctactaaaaatacaaaaattagctgggtgtggtggtgcatgcccgtagtcccagctactcggggggctgaggcgggaggatcacctgagcccagaggggtcaaggctgcagtgagctgttactgcacaactacattccagcctgggtgacagagcaagactctgtctcaaaaaaaaaaaaaatagactgggcatggtagctcacgcctgtaaccccagcactttgagaagccaaggtgggcagatcacctgaggtcaggagttcaagaccagcctgaccaatatggtaaaaccctgtctttactaaaaacacaaaaattagctgggcatggtggtgcgtgcctgtaatcctagctactcgagaggctggggcaggagaactgcttgaactcaggaggcagaggctgcagtgggctgagatcgtgccattgcactccagtctgggtgacacagggagactccatctcaagaaaaacaaacaaagaaaaaaaccaggcatgtcaagggggcgctgtctctccctggaagctgtgggttccgtccccctcaccttgctcagctttgcccactgcccaccctgtcagacccaagcacctgggcactgatcactagggaccttcaggaacctgcccccaaacagagacccccgggacagaggtgtccatgctgcccgcctgaggcccagagccaggtagggtgcagcaccccccaccccaggagggtaggagcagtccacctcccagagcctctggaggccccgatcggcagggttggggagcattcatcccactgaggcccacgagggccctccggacactgcccacccaggctgcagagggcctggtcacgctgacctgtggcccggaccctccgtggaagcatttcccgggcaaggtcaggggctcctgagttggtcaaggccccagccaggagcgggggtgagttgctatcgggcccagaaccgcccaggccttggtggtgcagggagcgcaggcagagcggaggagagctccccaaacccaaatgcgtgggtcacacggccagtccttccccggagctcagcgtggacagagggaagggacctcaggcagagacacctgccccacgccctcaccaggtgcccttggcccaagaagacaggacaacagggtcctcccgcccagggtcctccacccaaaactcctgccccagtctgaggaaacaccagcccgactactccagggcatccacaccacccgaccagccccaggaccgcccaacgcatctgaaacacgggcctctgagaaaccatcacagcccagaggggcctgaggagacgcctaaacaccacgtggggtcctgggcaggaaaggacatgggggaaactgaggcaatccaagcaaagcgtgggcctcaggagttaacggtggcgtacggatgttggttcatcagccgtgacagccacagacgggagatagaacagcagggagcccgggagtgggtgcacggggactctctgcactgtccctgcagcttttctgtcattctaaaacagtttgaaaagttaaagtcaagtcgggcaggggggagctcacgtctgctactcaggaggctgaggcaggaggatccgttgagcccaggtggtcgaggctgcagtgagctataattgcgccactgcacgccagcctgggagacagagcgagaccctatctcaaaaaaaaagttaaaagtcaagcagggcgtagtggctcatgcctgtaatcctactgttttagagccaaggtgaaagaatcacttgagcccaggagttcaagaccagcctgggcaacacagcaagactccatgtctacagaacgtttaaaaattagctgggcatggcagcatgtgcctgcagtcccagctactcaggaggctgaggtgggaggattgcttcaacccagttggtggaggttgcagggagccgagatcgtgccactgcacaccagcctgggtgacagagcaagtccctgtcacaaaaacaaataaataaaagtgaaagtctaataatgagggagtgcttgcagctttcaggcttcaagaacgcagcctcgaggccccgccctgctccccgtccggtccttcccagcacaggacaccccaccaggtgcatgagccctcgaagccttcacttctagcaggtgccctcagcgattagggacagagggagacggggttcccagggctggccctgttcacatgtgggaagctgaacagagccaggccagctccccccacagtggctccgtcctctgcccacatctggatttgactcctagcagccaccagctcacctcagagacagcctaagtcccacccgcgcctgtgtgtccctccacagcccctccaggccggcccaggctcctgcatccttcaccacatgacccacccaccctccagcctcagctcagcggacccagtgcctccccagggaaccgggcccctctgcagtctgtagtgagggcaagcaccaaggcccctcaagggtgacacttgcatccctccccgccagcccccagttctggggccccagggagggccggggctgcccgctgtggttcttgtctctgtagcatttcaggagccctgggctgaggtggggagctgggaggacctggctgggaggacctggctctgcccgcttcaaaagcagcagacacagctcctcctgccctgggcagccaactccagacctgactccagaactgactccagacctgatgtgctgccgctgccctgtgctccaggacccatggggagccacagagccacagggatttgccggcctgcgccaccagagccagccctgaccaggcccacccagcctccgctccctacaagagccccataagacacccagagcccctccacctgaggcttctccagaggaaagccacagctctgggtcctaccccaggggcagaaggagggggacgcagccctcccgacagccactgccactgtcactgagggcccccgtccgggcagggctgagcccgacccccccactccgctcgggtcccccagcctacgcacagggcgccgctcccagcccgaagtcttaaatctctgcctcggaaccttccggcagattccctctcactgccagaagagacggacggggcggggtggggatttttttagatcctggcggcctcggactctaggatgagatgccggctgctccggcagggggcccggccgtcctgaatggggtcccacctcccagacccctgcccccgagggcctcgcccgccccgggaagggagtgttaccttgttcagagcctcaaactgcagccacagctgcagctgggacatggtcccggcgctcggggggccaggggtcccccaggaagcgctgcccgggagcggctccctcatgaccgcggcagcagccccagcattgggtcggccggggcggacgggggcggctctccgcccggctgcatttgcatgtcggtttagtcaccgccgccggcgcctacttcctctaaggccggggctgactttcaggaaatgatgccggccccgtaagtcagggcaattaccggcagtgcgaggagaattactgtacggggcggatctcccacaggcgctgtcaacacgcaaccccacccgtgccccgccgcaggaccagccccctttggggcacccggcggacgtgcagaatgcccaggtgggcatgggcctcggtctccccagactgcagggagctgggttccgttccacggggaccagctgctgttcctggtgcccccaaaccacaggcagggaaactgcggccaagaccgcctcccttcacccagcaccccacgcatgccaagcgcacctcaggccctgctgcgcccccctggggctctccccaccccacccctgcaggctgaggtccccgagaagcccctgccgccgaagcaaagtcccctccctgctctttccctgctgtccgtgcccagggggttcagcgggccccgtggcctcccttgatctggggctggcggagggagagctgagcctgggcccctcctctccaggctctggccagacccggcctcggccccctgggcaggaacaagtggtagcgtcctgggaaaagaacgttctcgctttggtagaaaaccaagtgtcaatgatgcacttgctggggcaaccccgggccgcgagcccgcccgcggccacactcttgcccgcactgtgaggaccctggcgcatcacaggggcctagacaccgcggggcagacacctgatgggacctcacattgggccacaggcggtcattctcggtgtccttggaggagctggggaggccccagggccagagggggtgggaggacggccgggctgtggagaggacgggccccatctgcctgtactcagcgactgacggggcagaggccgcattgcccacgagaccgcggccgagaccgcgcaggtggccacggctcctcctctgtgaggggaggaagggcccggccctgtggccaggggccctgggaaagaaggaaaccgccccgagaggccaggggagcccgtggctgggccggagggctcgggacagttctgggcttgtaagactcccgccagggctctgaggggagagtgggaccagggggccctcaaaccctgtgcactccgccccctcgggctcaccctgttctagaccctgaggccctgtgccagccccactggggccccgcgaccaggcaccgcagcagcggaggctggtgcagactgtcgcccacaccccttgccacgacccatcacctcctggaggctgggcgacaacacgggtccgtgccgctggggcgaggggcccgcctgccaggcaccccgcccgccaatggaaaacaaccaatggggaagaaacccacggagccgctcaatccggcagccaatcacagccaccgctcaacctagcagccaatcacagccaccgctcaacccagtagccaatcacagccaccgctcaacccagcagccaatcacagccactcccagagacagctccacaccagctccacgcaaaaaacccacaaccacaagcgctgctgaggacgcggggcagtggcctgggaaccatcctgcagctcctcaaaagaggcgaatggggagtaacaacccagcagctgcactcccacgtgccatcaggaggacccacagctcacaaaagcctgaacctacagctcaggagtggacccacagcccacaggacccacagctcaagggtggactcacagctcacaggacccatagctcatgggtggacccacagctcataggcgcctggacccacagctcatgggtggacccacagcccataggacccacagctcacgggtggactcacagctcacgggtggactcacagctcacgggtggactcacagctcacaggtggacccacagctcacaggacctacagctcacgggtggactcacagctcataggcacctggacccacagctcacgggtggactcacagctcacaggacctacagctcacgggtggacccacagctcccgggtggaccctcagctcccaggtggacccacagctcatgacagcctggctcctgcagcgcagtcaccacggaggaacagggccagcacagtgaggccgtccacacactggaacacgacccagccatgaaaaggagcaaggctctgacccaagccacagcacggatgcaccttgaggacctcacactcagtgaaagacgccaaacacagaaggccacgcagtgtgtgaggccatttctatgaaatgtcctgtcctgaacaggaatccacacagacaggaaaagcattcaggttatcagggggtggggatgggctggggagtgacagctgatgggaacggggcttcctgtgggatgatggaatgttctggaactagacagaggtggtggttgcacaact[213 bp omitted]gaggcaggagaattgcttgaacccgggaggcagaggt[136 bp omitted]ggaagctgaggtgggcaaacagcttgagcccaggaagttcaagaccagcctgggcaacatagtgagatcccatctccacaaaaaatacaaaaaccagctgcgcatggtggcgggcacctgtggtcccagctgctcaggaggccatggcaggagaatcacttgagctagagaggtggaagctgcagtaagttatgatcacaccactgcactccagcctgggcaacagagcaaaatactgtctcaaataaataaagtggattttgtggtatgtgaattttgtctcagtttttaaaagacctggaaagcaacgaaacagaaagaacaagcacagactccgacttgctccccaggccccaatgtgacagcacagcccagggtccctggagcaggtcagactgaggataggggtgcgccgcctagggacctgctgggcactaccccacccacctccggcgccccgcgcccagtcctgggctcccgtggcccggtctctccctccgcctctgtccagggtgcacccctcactgaccagtcccgcagcaacgctgaccgagggctccgtgtaagcctggctgaatgcccgctgcctcagccctcacaggaaccctgccctgcattacagggagggaaacaggctacggggatgggaggggctcctcctggagggggctggggggcagacagaagaggcttccaggtggtcgtggggcacaggtggcacttcctagacactgccagtctttggtggctgggagaagggcccctcagcaggcctggtcactagagtgccccgtgcagagctgaactgtgtccccaaaatggtgtgatcatgtcctggcacctggaagctgtgtgtgtggccttatttgggaatccggtccttgcagatgtgagtggttaaaaaaaaaaaggccgcactggccgagcgggtgttctgtgcctggtgtcctcattcgaaggagacacagtcccggggaggaggccacgggacacagaagcagagatcccagccctgcggccacagccaggggatgcccggatcccccagatgctggaggggccggaaggagcgcggccctgtccgcaccttgactttggacttccaggctccagggctgggaggggacagagtcctggcctttgaagctgtgtgtgctgcttcctcacagcagccctgggaggctggcacggctccccaggaaactgggctcccttctgtcagggttccggccaggtgcctggtatgggccctggggccgccgcctcagtgtcttctggtgctgcagccgggcagggccgaaccctggcgcacagcttcctgctgagtctccctctctaaggctgtctgtgggcggctctgccggcccctcctgcacctgcccaggccctgggcggaggctcctcctcccgggggggctgtggcctcagcacagaccaggggacagaaggtggctcttcttggccttggctgggtgtgaaccaaagacttcctgtaagaaatccccctctccctctccctccttcgctccctcatctctctccctcttttttgcccaatgccagtaactgtgggggctccgtggtgccggatgggccgaggcatctgacccctgctgaaacgcatctgcagaacagtcaatgctgcctgcctccctgcctgaaagcagccagagtttgcaaagcgcttttctgagccgtgagctcatcctgagcttcccagaagcccccgggctgccaggcagagagtgttgttaccggacagctgcgttcccaatggtccctgcagccccatggggacccgggatggatgcccggcaggtggagaggtcctcacaggacaggtggtgggcaagggggcagcacctggggaatggggatgggctgtgggtgccgagagccccaggagcccagcagagacgcaagggatctgggtgatgtcaggaagggtgaaggagcacccccaccccaggaacaggcggcaagggatgggcgaggggcagtgaggcgagcaggacctggggaatgtcctgtgtaggggcacaggctggggagaggcttgggctggggtgcggttgggggaggctggcactggggtgcagtggaggagaggctcgggctggggtacagtggggggaggctcaggctggggtgaggctcgggccggggtgcggtggggggaggctcgggccggggtgcggtggggggaggctcgggccggggtgcggtggggggaggctcgggccggggtgcagtggggggaggctcgggccggggtgcggtgaggggaggctcgggccggggtgcggttgggggaggctggcactggggtgcagtggaggagaggctcgggctggggtgcagtggggggaggctcgggctgggggggtgaggctcgggctggggtgcggtggggggaggttcgggctggggtgcggtggggggaggctcgggctggggtgcggtggggggaggctcgggctggggtgcggtggggggaggctcgggctggggtgcagtggggggaggctcgggctggggtgcagtggggggaggctcgggctggggtgcagtggggggaggctcaggctggggggaggctcgggctggggtgcggtggggggaggctcgggctggggtgcggtggggggaggctcgggctggggtgcggtggggggaggctcgggctggggtgcagtggggggaggctcaggctggggggaggctcgggctggggtgcggtggggggaggttcgggctggggtgcggtggggggaggctcgggctggggtgcggtggggggaggctcgggctggggtgcggtggggggaggctcgggctggggtgcagtggggggaggctcgggctggggtgcagtggggggaggctcaggctggggggaggctcgggctggggtgcggtggggggaggctcgggctggggtgcggtggggggaggctcgggctggggtgcggtggggggaggctcgggctggggtgcggtggggggaggctcgggctggggtgcagtggggggaggctcaggctggggggaggctcgggctggggtgcggtggggggaggctcgggctggggtgtggtggggaggagaccagaagaggcaccaggggctgccctgggggacactcaccccacacagaaacaggtgccggagagcctgggggtggggccgcgaggctgggctgggcctggagcaggggacccacgggaggctctgggcacagagggtgggctgcagcagcaagggccccttatcctcgagcaggaacccaacaccccccagccagacccagtcatgcctggaacacacagacatggacctgcatatggacgctgctaacagcgattcacagctgctgtcaacccatacctactcctgggtatgagcccaagagaaacgaaaacgtgtccactgggaagtttgcacccgtgctcacggcggcacaactcacgacggccacgggtggaagcagcacaagcgtccatcacggacacacagacagacacagtggggccctccacgcctccatcacagacagacacagtggggccctccacgcctccatcacagacggacacagtggggccctccacgcctccatcacagacagacacagttggtcctccacgcctccatcacggacagacacagtggggccctccacgcctccatcacggacagacacagttggtcctccacgcctccatcacggacagacacagtggggccctccatgcgtccatcacggacagacacagtgggtcctccacgcgtccatcacagacagacacagtggggccctccacaggtccatcacggacacatggacagacacagtgggcccctccacgcgtccatcacagacagacactgtggtacctggtacctccacgcgtctatcatgaacaaaaacagtgggtcctccacgcgtccatcatgaacaaaaacagtgggtcctgcatgcgtccatcatggacaaacaaggtggggccccttcatgtgccggaacacggctcagccataatcaggagccaggctctgacccagccatagctcggatgtaccttgaggacatcacactcagtgagagacgccagaggcaggaggccatgcagcgtgtgatcccatttctatgaaatgtgcaggacaggccaagccacagagacgggaaggggatgcgtgggcgccggggcaggggagggatggggagtgacagctgacggggacagggcctcctctagggggacaatgatctggaattagaattacatggtgatggctgaacagctctggactttgtaacagccacagcatcgttcacttagaaatggggacttttctgtcacgtgaattgagtctcacgtgacagaaaaggggcggggcgtggtggctcgcacctgtaatcccgacactttgggaggcc[135 bp omitted]gaggcaggagaatcacttgaaccaggcaagcagaggctgcagtgagctgagatcgtgccattgcactccagcctgggagacagagtgagactttgtctcaaaaataaataaatatggtgcgcgtctgtaatcccagctactcaggaggctgagacaggagaatcgcttgaacctgggaggcagagtttgccatgagccgagatagatcacaccattgcactccagcttagacaccaaaagcaaaactccatctcaaaacaaaacaaaaaactagagaaaaacagagacagaaaagaaagaaagaaaataaagaagaaatgcaggccgggcgcggtggctcacgcctgtaatcccaatgctttgggaggctgaggtgggtggatcacaaggtcaggagattgagaccagcctggctaacacggtgaaaccccgtgtccactaaaaaacacaaaaaattagctgggcgtggtggtgggcacctgtagtcccagctactcgggaggctgaggc[135 bp omitted]cacagaaccacggttcacctgcacaccgcggcagggggccccaccaggacacacggggctgagccatcacccaccagggacattgagcctgatggcttcgcgccaacctggagacggaaggctgagcagaagtgaggggggcccttcctccgggccagggtggctggagggccgggcaaggcacacacgtgacaccgcgggagccccgcagcccacggtggatgccagcagcggcatcctggcgcagcgtgagccccaggggtgggggtgggggtggccagggagcaggcagagagcggggaaggggtgggggtcccacacagacccagccgtcagcaggagaaggcacacggaaaacagacggacgcagcagggatgcccgcaggcagctcccacgggcagaggctgctgaccccgccttgggcaggaccagcctctgctcagccttgggtcttcccccaggctgagagaaacaggaaatggatggtgaaggaaccccgtccccgccaagcggccaaagttaccagcatcagcacaacacgcgcaacgccaggcactccggtccacgccgcactgtacatggtgccgtctgagggattcctccatccagtcaggagacaaccccagacaaaaccaacggagaggcactctggagaagacacaccctggagaagacacaccctggagaagacgcaccccggagaagacgcaccccggagaagaggcgccccggagaagaggcactccggagaagacgcgccccggagaacacgcgccccggagaagaggcaccctggagaactgcctcttcgggggcaagcgcagaggctgctgactcccccggtccaacaagctcttagtttttgcaatttttttgtaatttttttttttttagacagagtcttgctctgtcacccaggctcgaatgcagtggcgcaatctcggctccctgcaacctctgcttcccgagttcaagtgattctcctgcctcagcctcctgagtagctgggattacaggtgcccgccaccatgctcagctaatttttgtatttgtagtagagacggggtttcgccacgttggccaggatggtctcaaactcctaagctcaggtgatctgcccgccttggccccccaaagtgctggggttacaagcttgagcactgcgcctgacctgtaaatctaatttttaattttgtatagagatgaggtctcattatgttgcccaggctggatccacgtgtccttcatggacaaacacagtgggcccctccacgcgtccatcacggacaaacacagtggggccctccacgcatccatcacggacacacggacaaacacaatgggcctcccactgggaactcccagactcaagcgatcctcatgcctcagtcaaatagatgggacccaaatactgggactacaggcttgcaccaccatgcccgactaattttttctattttttatacagatagggtctcactatgttgcgcaggctggtctcaaacccctgggctcaaacaatcctcccgccttggcctcccaaagtgctgggatcacaggcgtgagccaccgtgcccagtcctgactcaaacatgacctcctgcattcccaggggcagaatctcccaggcacagtggccctactcggagtctgtgaagtgaagaccaccaggtgagccatgatcaaccctcccctcaatgacctccctcacgatcaaccctcccctcaatggcctccctcctcatgatcaaccctcactcagtgacctccctcatgatcaaccctccctcaatgacctccctccccacgatcaatcctcactcaatgacctccctccccatgatcaaccctcactcaatgacctccctcatgatcaaccctccctcaatgacctccctcacgatcaaccctcccctcaatgacctccctccccacaatcaatctgcccctcagtggcctccctccccaggccgtgaaggctctccagcagaaccaacagtgctgcggagtccactggccccaggcactgcccgggtccacggctcatctgctttctcctattgctctggctgccaagaaactcagggctcaggtgtatcaatagt[134 bp omitted]gaggcagaagaatggctcacacttgggaggcagaggttgcagtgagccgagattgcaccactgcactccagcctgggtgacagagcgagactccgtctcaaaaaacaataggccaggtgcggtggctcatgcctgtaatcccagcactttgggagacgggcagatcacctgaggtcaggagttcgagaccatcctggccaacatggcgaaatcccatctctactaaaaatataaaaattagccgggcgtggtggtgggtgcctgtagtcccagctacttggtaggctgaggcaggagaatcgcttgaacccgccaggcagaggttgcagttacccaagatggcgccactacactccagcctgggcaagagtaagagtcggtctccagaaaaaaaagtcatgactagctgtctcgttatggcctgtggggttttacattcaccctcactcccagcccaggaacaggttctccctaccaatccctccaggtttatacaacagcaggaaacatttgcagggaatgcacacatgccacaggtcacacgatggctttgaacggtgcctccgtttcccctcgctcccgtgaaaagctactgtcaacctcatggctccaacaagctgaatatggtggctcacgcctgtaatccccatgctttggtaggctcaggcaggagaatcgcttgagcccagaagtttgagaccagcctaggcaacacagtgagacctcatttctacaaaacataaaaaattatctgggtgtggtggtgtgtccttatggtcccagctactggggaagctgaggtgggagcttgagcccaggaggtggaggctgcagtgagccgagattgcaccgctgcactccaggctgaacaacagagccagaccctgtctctaaaaataaaaattaaaaaaatatataaatgaaacacacacttatcctctcacagtctggagggcagaacttgtaacatcaagggtgggcagggcaggtccctcccgggggctccaggggaaaacccagttcctgcctttccagtgtccagaggcacccgcatcccttggcttggggccccttcttcccccttcacggccagagcgcaggctcttcccgtctctctctggctctcaccctcccgcctcctctcatgagggccctgtgaggacactgggtctccaggtcacccaggaagctctcccgtctcgggtccatcactcagtcccatctgcaggtccctgtgaggacactgggcctccaggtcacccaggaagctcttccgtcttgggtccatcactcagtcccatctgcaggtcccgtctgccatgagaggcgacacggcggcaggtcctggggatcaggacggggacgtcttggaggctgtaaccgtgtggccagcacatttcctcaggtctgagtcgggagcagaggcttccgtggctggctgggctgcgctggggggcacggcgcaaagggcctcgaacaccaggctcaggtctgggctccttcctggctccgcagaaccacgcggcccagcccacaggcctgggctgactcatacccgtcccgtcccacacttggcaccgcgggaccacgcatcccgtcccacactcgacaccacagaaccttgcggcccagcccacaggactgagctgacccacacccgtcccatcccacactcagcactgggggaccacgcggcccggcccacacttggcaccggggtcagacttcctccaaatgaagttctgctgctttaacagggagatttgggtccaagctgccccacatacggacgctggagcatgaggcggctgtaggcagggtgggcagggagccgggcgggcggtgctcacagaaccagcacagtggccccgagggctccgggctgaacagatgcagcagcaattgttcaggaggggaggagcaggagaattcatgagacagagatggagacggagacagagacagagacatggagagagacagagacagggagacagagacgcagagacatagagacatagagacagaggcagagagggaaacagacgaagacagagagggcgacagagacagaggcagagagggaaacagacgaagacagagagggcgacagagacagagagggaaacagacacagaggcagagagggagacaaagagacaggtggagagggagacagagagacagaggcagagacaaagagacagagacagagagggagacagagagacagagacagagagggagacagagagacaggggcagagacaagcagagagggagacacagacagagacagagagggagacagagagacagaggcggagatggagacagagacagagagacagagacagagagggagacagagacaaagagggagacagagacagagactgagagggagacagagagatggagcatagagggagacagagacagaggcagagagagagacagaggcagagaggaagacagaggcagagagggaggcagagacagagagggagataggcagagagagattgagagggagggagacagagagagagactaggagcag[138 bp omitted]catggagaaaccctgtctctaccaaaaaaaaaaaaaaaaaaattagccaggcatggtggtgcatgcctgtggtctcagctgctcgggaggctgaggcaggaaaatcgcttgaacctgggaagcggaggttgcagtgagccaagatcgtgccattgcactccagcctgagcaacaagagcaaaactctgtctcaaaaaaaaaaaaaaagaaagaaagaaaggaaagagagaaggaacacacagaaagaggcagagaaggggtgaaagagaagaagggggcggggcaaggacaggctgacccagggctggggctggtaggaaggcagtggcggtgaggaaggagccactgccatcagtcgcaccccgggctcctcccctgtgcgtcccctgaagggtggggcacagatgccagctctggacaggcgcctcccctgcctcagtttccttctgtgtccggctggcatggcgcagcagcttgccacaccttggccaggaccagatcacatgggggtccagggctactgcgggtgaggacagagcccctgtgcgcacctcgctgacctcagccccaagatgagcaggggcgcccccctcccctgaacacagctggtaggccaatttccaggccacacactgggggctacaggacaggaatccaccctcttcccgtcccagggcccgggagtctgaggccaaggtgtctcagggccttgctccctcccacagctctgacccacctcttccagccctggggctccaggagaaactgacctgtggccacaccgccccagccccggcctccagcgtggcgccagctcccaatctctcctgtctcttctgaggacccttgtgctggatttcagagctacctcatctcatcttgatccctacccaatgacatccaaaaagaccctactttccaggaaggtcccctcacagactctactggggaggcggacttgacggacgcggtcaccccagcacagactcagggtccggctggctttgccccgctctgctacggccctgagtggggaaaactgggcccggggtccacccggcgagctgtttgcagggcctgggtctgggtgagccctgggacctgaattggctccattctgctgcagccacacctgaccgcttctctctggatctggccggcttgcgcccatccccccaacagctctgaggcccaggcagatctcacatgcccattacacaggggaagcggaggcttgggggagctgagcaccaggtgaccctcgctccccggcaggccctggatgtggtccggcccagcagcagcccctggccccgggtcccacacggaggctgtggtatccgaaccgtcccagggaagccgatctctgtggcactgggtgctccagagctgccgagaggaagctggggcactgggaaccccttggggaaggctgtgagggtgggggtggggtccgcctgatgccgcagtgggaggctgtgagggtgggggtggggtccgcctgatgccgaagggggaggctgggagggtgggggtggggtccgcctgatgccgcagtgggaggctgggagcctccccgcgaccctggggagaaggaggtggaaagttctgttcctttggtatgtgagttccgttttcaggtggctgctaaggggttgggactccaatgtgcagggtgtctggacccgcctagagggagggccgtgggggcaaaggctgccaagggcatctctcccagcaccgccctccccgcaactccctctgtggcattgcccagatgctcgcagggaccccaagggctgggcggggctcactgctgacacgaagggccagtcactggctcttccccaaaaccaagccacatctctgggctcctactgccccaccgtaaaccctgcggccgaggggccaagccgaggtcactgagtcccaggcaggcctgagcgagagaggtcgcagggcagctggaggggcggcccagactccaccctgccccccacggcgcggtgagctcctggggctcctacctgagcaaagtcgcaggtctttggtggcaagctggaggcggtggccacgggggcatagctggtgtctgggcagggctggctgccgaggaaggaggcggagctcatgaacgggctggagggagatgggggggggggaggtgagatggggtgctcaacccactccctcagtaacacacctgcacccccatggccgcagccagaggcccctcgaggccccactggagtgtgcccagcccggcaggacccatggccccgctgcacatacagaggggcctccaggggggtggtggtcaagcctggggctgccctcccacccccactggacacagcccggcagagctcctacggaacagccgcctggtgggcggggggacatccagggccaccatcccgccctccccgctccatcagcaggactcggctaagggttcattctggcgattcagaaccccagcctggccatccctcccccacacacaggccccttgacccacacctcactcccgcctcgaaggaggagagcgctacgggcagaaacccaggatcaccgtcctccagggagggctcaggtcggaaccccccgccctgtcaccctgaggatggcaaaggacacagcaaggagaaggtcctgggggccccccgcccaggggcgcctctctccagatgatcccaggagtaaaatgtggctggcagggaggcttctctgcccttccccactccggcccccttggccagctcctgcgcttgggagaggggtggccgccgtccccagggcctccttccctcccgccaggctccccaggctctccctccagaagcttctctccagcagggctggcagcaggtccaggtctctgcccagtgggagccggaggccttgggttggaggcggccctgggcagacctgctcccagggcagggaccgcctgggggccactctcctcctgcatagaaaggtttgcaaacaccagcaggaaagaagcatccactccactcccgggccacaaacagctgctccacaatctcctggagtctcccaaggctctggctatacctgctcccaagccctttgcacagcctgctcgactgctcgcctggccaactcctaccccccctgcagaacccagcccagctgctgccctctgtgggaaaagtgcccttcccaccctccttcacccaccccagaaaacctcccgccccttcccaccctccttcaccccagaaaacctcccgccccttcccaccctccttcaccccagaaaacctcccgccccttcccaccctccttcaccccagaaaacctcccgccccttcccaccctccttcaccccagaaaacctcccgccccttcccaccctccttcaccccagaaaacctcccgccccttcccatcctccttcaccccagaaaacctcccgccccttcccaccctccttcaccccagaaaacctcccgccccttcccaccctccttcaccccagaaaacctcccgccccttcccaccctccttcaccccagaaaacctcccgccccttcccaccctccttcaccccagaaaacctcccgccccttcccaccctccttcaccccagaaaacctcccgccccttcccaccctccttcaccccagaaaacctcccgccccttcccaccctccttcaccccagaaaacctcccgccccttcccaccctccttcaccccagaaaacctcccgccccttcccaccctccttcaccccagaaaacctcccgccccttcccatcctggtgtcacctccacaggaggcccccctggcccatagcccacacctccccgccctctaccaagctgggctctcgaggagagggaagccatggatcacaaaacagcgttccacaaacaggggtctcagcctggacctggcccgtggggtggagccttccaggaccacgtgcacaccaccctccaaacccctcaacaagactttgggccctcgcgccctgcacccagaactccgtttgtaactgtgacttcagaatgagcaagcctgggggccaggcggggagggtcccggtactcaccggctgtcgctggagaaggcagggtatggcggcagcgagaaggtgttccagtaggggcagtgcagcatggcgctctagaagagacagcgggcatcagtgagtgggaagcagaggacctgcggtgcagcccggctaagccctccgggcagggtgacaggccgagaggctagggaggccccgcagtcagggtcccatcccgcccctgctggtatctcctggggagtcatttaactgccccgtgcctcagtttccccacctgcacaagaccccacccaaggcttgtggtgtggtctgaaggcactgaaccacccgcgtgaagggctcagcacaggtcttgctctaccagcagccccatgtgcaggcccgcagcccgggagtctgcatctcacacaagacctgggggtgccgctggccccgggaccctgcttggaggccccattctaggaggtggaggatcggaccgtttgcgtgagggagacgcgcacccgctgcctgtggtggagggtgggtgtcgggggctcctcgggcagggcctggggcaggcgagggcctcacaccacctccaggcccctcggacaagctgatgtgcccgggaagctcaggctgctgcgggacggggccctgacttctcagaagctgcacggggctggggtgcggggagcctgctttgggaaatggtgaccagtggcctggaggctcagcccgaggtcagtggaggcgtgagtggctccaggttggccgaatctctggtgggtctgactccaggccaggcttacccaacaccctcgccaggagccgatgtccccaccccatggttctctgggaaaacctcactatgcctgcccttgggaatgagagcggcttgaggcacacggcaggccccaaaacctgaggatggggagcacacggggcagcagcgggcccaagggcggcagcgggcccagggtcagcacctgcggcttcgggggcagggctgtggacacctcgtgccctgcagaatgggcacccctcagcagggcccccacctgcacagggccaacctcacctgcagcagagagaccctgccgtcacagacgcccccacagtcacgggggagaccctgccgtcacggatgcccccacggtcacgggggagaccctgccgtcacggacgcccccacggtcacgggggagaccctgccgtcacggacgcccccgtggtcatgggggagacaccaccagccgggggcatcatcctgcttatcccagcaggactgggggccacgctggcttccagaacagggttgggggttcgcctgcttccctgagtcccccagtgacctctcccaggcccacgtgagccctgctcctctatgaggccctgatgcaattccctggggctcggccacctctgcccctcattcacctcacactggctgggaaccagcccggatggccgggggccactttctgtacccgcaggtgctgggtgggggattccaggacccccgacagcctcgagataggcaaagccctcggggtgaccgctgccccgctcctccagcttttgcataaaataagtttatcagcaaaagcccacagctcctcccctgcacagaggccggcagcctgggcaccctgagctcctgcacccgtgagaagaccccgtgcaagtggcttgcaggaagccgggccaccagccacaggggctccagagcccgggtctcctgatccttcccctcctcctgcccttttgggaagagagaaagccagccctggagagaaacaggaacttcccaaggccatgtggcacatccggaacattctggaacagaactctgactccagaccaacccagcctcctcagatgagctggagtccgtctcaggcacacacggcgccttgggccaggctgggcagggccacggccagggaactgcagctgcaggaagggggcggggggcttggggtcgcagggcgggaggatccaggggtccctggctcacccaacatgctccacctgtacccaggccaggctaggggatgggacggggggaaagtcctgactgcctctatccccctagtctcctccctcccacagcccatggctcctctgagacctgccatccacacacacccgagtcccaccccacaggggtgccatgggcatggcaggccaatcagagtcttccctgggaccttctctggcagccagagggtgtggcttcacctttagatggcaggtcctagcacataattggtccagagatgggcacctgaccctgcccagacaatcagagcctgcctggtgattttctttcctttccttattttgagacggagtctcactctgtcacccaggctgaagtgcagtggcacgatcgtggctcactgcaacctccacctcccgagttcaagcgattctcctgtctcagcctcatgcgtagctgggattacaggcgcccgccaccacgcccagctaacttttgtatttttagtagagatgggatttcatcatgttggccaggccggtctcgaactcctgaccccaagcaatgtgcccacctcggcctcccagagtgctgggatttcaggcgtgaaccattgtgctggccggtgtatttttatttctaattgaatactctgggcactggaagaggctgggctgtgcgtgtgcgaactcagtcgaccctgcccagaggtgtccatgacgtacccgaatgtgacggaacccggaacagggagggtgggatgagcctcacacacgggatggggagcaaagccggttacgcgcacgggtgcgccccggcctgagccctgtggctggtgtccagtgcccccgccgggttccagccctgtcgcattccccgactgtcactgctaacaccttcctgctcccgctcggatccttgaagatggctcctctgtctccacatcccataattcgcttaattatttccccaccgtagagcctctggggagattccagtttcctgccactataaatagtgccgctctgtcttcccctccctcctggattagtccccagggtgtgtttccgagatagaattcttggatcggaacaagctcctggcgggtttcgggggatggagctgttccggtggggatgtggcttggccagtcccctttatggtggcccaggaggctgaccgacggccggtactcgagctccaccggggcagctgtgaggatccagcctcaaccccaagggactcaggaactagggagggggacaggaggggtctgggccgcaacagggaccctgctacgagaggggtaccctggccccagctcagagccccctctggacggtcagaacatggcaggaagctgcccaaagccctctgaggatggactgccgaggggtgtctgtgatgttcgccccacaggccaacctgggtgttgggctagggagtacccaggagaccctggagtcctggagcaggtcctgctgcttgata[138 bp omitted]acggggcaaaacctcatctctacgagaaaattttaaaaatctgccgggcatggtggcgcgtacctgtggtcccagctactcaggaggctgaggcaggagaatcactagcccaggaggcagaggctgcagtgagccgagatcgcaccactgcacttccagcctgggcaacagagtgaaaccgtgttttaaaaataacaaaacaaaataaaataaaatgaaataaaataaaaataaatatatatatacacgtttatatatttttaatttaaaaatttttttttttctttttgagccacagtttcgctctgtcacccaggctggagtgcagtggtgcaatctctgctcactgcagcctctgcctcccaggttcaagcgattctcctgcctcagcctcccaagtagctgggattacagacacctgccaccacgccaggctaattttttgtatttttagtagagacagggtttcaccatgttggccaggctggtctcaaactcctgacctcaagtgatctgcccgccttggcctctgaaagtgctaggattacaggcgtgagccaccgtgccaggcctatttttcatttttttgagatggagtctcactcttgtcgcccaggctagagttcagtggcgccgtctccactcactgcagcctctgcctcctagatttaagcaattctcctgcctcagcctcccgagtagctgggattacaggcgtccgccaccacgcctggctaagtttggtatctttagcagaagcgaggtttcactatgttggccaggctggtcttgaactcgggacctcaggtgatctgcccacctccacctcccaaagtgctgggattacaagcacgagccacttggccagaaacatattttttaagtaattccctcactgacaggttcctacaagtaaagttgagccccccctacagctgacggcgaaggaactggaagctctgcagcagggagaatctcctcaaatgtgcttcttgaaaagctggggccatgagtagcctcccattcacatccccatggggacccttctccagggcccacgggggcgggtggagccgggctccgggccaggaaggtcaggtggagatcacgccgcgtccactggggcagcattccgcacgacgtgaccccgggcactcggagcggggcaagtgcccgtggaccccgtcgggtgggccggggccgggggtggggctcacctgcaggggcggcgggctgtacaggaggctgcccgccggcgggggttcatgctgcgggtaatccctgtccatggcgggccccactgcaagcatcgggcggcaggcggggtggggtcctcggccgggcagcaggcggcgggactccaggacccggggccgccggggcgtctatctgggcttctcgctccgtggtggcggcggtggcggcagcatcatgatctgcagagggagacggggacgtcctgagagtccaacggtggtggagagtggtgctccccggccgcctctccctcgggcatgaccggtcccagcctgggctgcagctcctgctacctcctgggccggaaccaaaaggcgctccttcccctccccactcacccccacccgccatcagcagtgccacccaactcctttgtgctgcccacagcgcctttcctggcctccccggccccaactacaacgattaaggtgggcccgacagggctgcccaggtcacagggcagccgtaggaccaggcacccagactgtgagcagtggagctgcaggctgactcccccacatctggctttgtcagcagccggtgtgagactgtggagggagagtccaacccgggcccggcacccaggggagcccaggggacactggacccagccctgtccctcagaggcagcaggggctccacagtgaggtctcccaaggaggggggtcaggggccacgcagagctggaagagcacccagacctcgtttcaggctaatcacacaccagcatccccactgagaacgttcctgggctacagagccgagccccacaccatcagacgccagggacagctcccacgtgccccgcggcctctggcacacggccagacgcccgccaggctgagcccccaccaggccctacctggcgagtgcagggacccaggctggcccgtggtggcagggaaagctttccaggcgtccgcccagcatgctcactgccgagggcggcaggaaggggaggcggcggccactcccggccaagccctggagtgaagaaatctccgggacttccagtaattgccgtccagccacacgcaggcacttgtgcaatcccgtgggggagaggcacgtctctgcccggcgctccagagacagtggccgggcaacaggggctgggggtcgggactcctgtcccagagaccagatggaggtggtcaggcacagtgggggtcaccctgccaggccgtcccaactgtccgcggcctctgcctgctccctgcagtcaggacgctacaacccactgccaccagagctgggacccttggcagcccttccagctgcccacggggacctgcgacacccttgccagaacggccctttaggggaagggacaggcccgctgggatctggggtcttggccaatccttgtcaaagattctgggtcaggcaggatcaaagcctggctccaccttctgagttgaataacctcagacacccaagctcctccaagcctcggtatgttcctctgggagacaggttctctgggtagagcctgggaccccccgaccccggccccgtgtgctggtggccacaaacagctctgctgggcccaaggcagctgctgataccggggtccccatccaggggcccaccagtgctagggggtggcccaccccctgccttggggctcagcagcccctcccctgcagggactcccctcagctcctgtcagcaccccttcctgctgcaggttccatctcacggcagccacagccccagagctacgctgaccttttccacactcagggcgctcctcagctctgaggccacacagtcctgagctgatgggcagcagggcccaggccccacggtggacggagcttggggagggggcaccttgggcagctctggggcgaccccatgaccgtcctcggggtacaccatagctgagggacccctccagcagcaggggccctgagctcgcctgtgtccgagtcccctaggccagcacggtgctcctggcagctcctccctccctacggtctctgagccccccacgtctgtggacgccccttccaggcggcaaccccaggaggctcaggggaccgggttcttcaaggggagggcttcacacatggcatgtgacctggagtccatgccttggggacctggcagggtgtggagacctggaccgggaggggatgggggcaggagaacaatgcggacaccaggcacaaccaaccaagagtcagggcccaaaaccaggaggcggaggcggaggcggatcctcacacacggctgcttggcagtctgggattcctcaagaggctaacgctggagtcaccacaccaccgagcaattccacaccacacagaaacgtggccatgcacgtccacagcagcaccactcacaacagccacccgaggaagcagcccagtgtccacggataggcgagtggaccagcatgtggcgtggcccatccacgtgccagaacacgacacagccatgaacagcagcgaggccgacctaggccacagcgcagacgcaccttgaggacgtcacgctctgtgagagacgccaggcacagatgtgtgtgatcccactactatgcactgtccaggacgggcccatccagagacagaaggggatgcgtgggtgccgggctggggcgaccctgcacccggggcccatttccaagtccccccacaacccaacacttcaggctgtgcccactcctgagaacgcccaccctctgcaatcccccaggacccgccactcctgagaacgcccaccctctgcaatccctcaggacccacagccctgcctttccgcccactgccagccccccatcgcctcccaccctgtcctcggccatatctcacaacccctgctgccccgatccccaggccctcccgcagcccccagcccctagccctgcctgcagactcggtcctgtccgagggcccacgcccccaagggctggctcccaccccatggtcctgagccctccggacccttcccccattgactccgccgccgtttcttgcagcagctgtgaccacgccatgtctctggggcatccagctgccccaatccccaggataaaccctagtgggacactgggtggggtcttggggcctgagaacaccccaacgcagcctctgccacgcagccccggagacgctctccccacgcggccccggagaccctctgccacgcagccccggagacgctctccccacgcggccccggagaccctctccccacgcggccccggtgacacggcccaccccgagcctcagagccacgggccagccaaacgtccagcgggcagcagagcgtgtcccctgcctggttttatttttgggcgcgagtcccatgactggagggatgcgtggtgtgggggttgggggggcgggggtcacacggttcccaccttgggagggggcccgcgctttatcagcacgctgacacccagaggggatgtggcttccttctgaaatcaggtcttcaagggagtcgttgtaaaagagaacgatgaaggtgctggtggcccagacaggacaaccactgggaaggcagaacctcagacaggaccaagatccgggagaatccgaggaaccgggtaactgtgtccgcctcccagctctctcctgagtccgggtaactgcgtccgcctcccagctctctctcttgagtccgggtaactgcatctgcctcccagctctctctcctgagtccggataactgtccgcctcccagctctctcctgagtccggataactgtccgcctcccagctctctcctgagtccggataactgtccgcctcccagctctctcctgagtctgggtaactgcatctgcctcccgtctctctctcctgagtccgggtaactgcggccgcctcccgcctctttcttctgagcctgctgaagtccccgtcttcctggctggacgccccagggtctcaccccacgctgtgcagcaacagctcagcctcctgatgttcagaactggccactgtgcggaccctccccctgggggtccctgagcacctgtcgtgtggagccccttcgcgcgctccgccctcagacccgagccgtctgcagatggggagctgtgtcctcggagcccggttctcctgccgtcctctcgccgagcagggttgtgacccccgcactttcggatgtggacacggaggcccctaggtggagccttgacgtgacccccagagccagactcagcagctcaggccacgctgtgcccacgttcgcgacggcaaagcggagaccctgagaagacactggccgcagagccataaccgagaccacgggaggacccagggcgcacggcacaccccagagcgctccgcccaggcccgggttctggtctcctggcacacccggcagcatctcaaggcctgcgccagcaaaggcggacatggaggtctgaggaggaggcggcgaggcccgggcgagcgggcgcgaccgtggtgatggagcccggcagaggccaccgcacagtccctggaggccgcattacctcagccgaggttctccgggcaggcacaaggcgctccctgcgtcccaggacctgaagatggcaaggagcaggcccccgggtgtcccgggaaccccgcacagagccacggccataagacagagcggacttgcggcctccggtgacctcacagccgtgatggcctcctgcagctgtgaccgccgccccacagccgcgaccccacctgcagccgtgaccccacctgcagccgcgaccccacctgcagccgtgaccccacttgcagctgcaaccgccgccccacggccgtgaccccacctgcacccgcgaccccacctgcagccatgaccccacctgcagccatgaccccacctgcggctgcaaccgccgccccacagccgtgaccccacctgcagctatgaccaccgcacactggcctccagatgggctcaagacagggcaatcaccctctacctggcgggcgcacaactcgcatcctaggaccgggtgcagggggcgggggctggcgatttcacaaggctcagctaatatggggcagagagccctgcaagctcaggcacctgggcaggccccaactcggccgccaggaccgtctggtggggaggacactgcaggccgtctcaggtcctgacccctgcagacagagcgcttcgtccctcaacatggagcccggggcaagggaggcctgaagggctggagccaagggagggtcagcccagtgagagaccttggggggacgggggtagcaagagggggtagcaagggacagttggggacagcaggggacagtggggggacagggggcagcaggggacagttggggacagcaggggacagtggggggacagcaggggacagtgggacagcgggggaagagcaggggacagtggagggacagcaggggacagtggggggcagtggggggacagcgggggatggtggggggacagcagggggacagtagggaaacagtgggggatagtgggggggcagcggcggatgggacagcggggggacagcaagggacggggtgacaacagggagacagcggggagatggggacagcggggggcagtgggggacagtgggggaacagcggggggacagtggggggacaggaggggacacattcaagacatccgtgaggttcccctactcctgggccaaggtgcctgcctgagaggacttcgccccccacagagctgggcagtggcagaggagggggccagggaagggaggtgggtgagggagaccccagagtgtccggcgctgcccctgcccacgccagtgctgctctctgcagccatcagcctccgggtgcccccgcctgccccgccacgcggccacattcccgcaccaccctctcacacgttccaccccaggggcagcacccgccctctggctgtgggtgctggtgggcagcttgcgcctggcacctgtttgtgatgggggaagctgccccggcagcgaggctgagggagcgggaagggctgggcctggcagaggaagagcagccgctcacccacatccctgcagcccggctggggcccagcaagccgctcacggtccccaggccctcatgggcagccccccacccactgggtacatccaacttcatgcaccaagagcccatgaagaaaccactcccacacccctgcccaggcctcggggggtctgcggggcggcctcacaggaggcccagtattacaatggcggccgcctggctgcagtgagtgcctggtggacacccccgaagggcagtggggagacccgggggaggacgcacagagggtggctacagaacagaggcagctggctggagccaccgggggtctcgtccctgcagccttcgcctcctgggttccagtgatttttgtggacccactgggggtctcggctcactgcagccttcgcctcctgggttccagtgatttttgtgcctcagcttctggagtaactgggatgacaggcacccgccaccacggcccggataatttgcgtattttagtagagaaggggtttcaccatgttgcccaggctggtctcgaactgccgatttcaggtgatccgcccgcctcggcctcccaaagtgctggaattacaggcgtgagccaccaggcccggcccgaatggaaatcattttcatagtaacatgaatctctgtaactcactagactgtggccagggaaacctgtgggcagctctgccaggaccacaagggggcatttgctctggacggcccctcccagggtgggcagggcccgaggacggaaagaaagggtggagggtcctgaggtgcttcccagaaagctcaggctgctcctccagccaggcacagccagaccgggagcaccgggaggtgggggtgggggtgcctgagcactggaggctggaggtgggggtgggggtgcctgagcactggagatggaggtaggggtgcctgagtactgggggtgggggtgggggtgcctgagtactgggtactgggggtaggggtgcctgagcactgggggtgggggtgggggtgcctgagtactgggtactgggggtaggggtgcctgagcactgggggtgggggtgcctgagcactggagatggaggtaggggtgcctgagtactgggggtgggggtgcctgagtactgggtactgggggcgcctgagtactgagtactgggggtgggggtgcctgagtactgggtactgggggtgcctgagtactgggtactgggggtaggggtgcctgagtactgggggtggaggtgggggtgcctgagcactgggggtacctgagcactgggggtggagatgggggtgggggtgcctgagcactgggggggtggaagtgggggtgggagtgcctgagcactgggagctgggggtgggggtgccttcctgtctcaacacagctttacctcttgggcccgatgaagcgggtctcaggatgcccaggacccacattttaggaacggccacgtcatactacgctttctacctctcctcttgaaattttctaaaagttctcaagtctgctgccaaggttatcagaactgcgtagggagctgtgtgggtcacctgtgaggcccggagcctccctgacgcaggtggtgggtgtcatggctctgctgtcttgtgaaagagtcgtcagtcaggcggcagggccaggagggtgaaagccgatccactcccttccctggggagccgcgggggggggggggggggggttgggccaggcctgcggggaggagccgacatacagcttccccagcagccggccagacagacggacgtcctggcccaaggtgagcgggcacggccacagatggcgcctggggcctttgcaggcgccctcctggccccgaggctgtggggctcctttgtgggggacacagggctcagggaccactccacaccctagacgggagcagggatggggtcttttaaagttaaggttttattcttttttaaaataata[136 bp omitted]atccaggcgtggtggcgggtgcctgtagtcccagctactcgggaggccgaggcaggagaatggcgtgaacccgggaggcggcgcttgcagtgagccgagatcgggccactgcactccagcctgggtgaaagagcgagactccgtctcaaaaaaaaaaaaagaaacgctgttgggggcaggagcctggatctcaacccctgcaaggtggaaatctggcttcctctcacccatacgagcctgccagaggcaggaggctgacgccccggagggaccagctgacatcggccttgagggaccagacttctccaggccggcaaccttctcccagctttgtgaggtggagcccaacctccagaccaagagaggccttcctgaccttcaaccccatctccagagctccccagagctggtctagcccctcatctgacacacagagaaacggagaccaggaacctgacgctggtttccctagcccatgtgaggaccctgtagaccagctacatgcacacccagtccagccgccggacagcgttcagtgggaagagagcagaccatcgtccacccacattccagactccaactggcagaggggaggggacgttggggctgcagggccaccaatgtggacgggacagagccccagggacagcctgtgctggggacgtatgggggcaggatcagaccccacagtgcctgcgggccacaaggccaagacaggatctggtaagtgacgatttggaggctggtcctgaggtgcaagagggagtgccagggacagagagggcaccggggtgactacagtccctccagactcacatctacccgcacctgtgggtggggccttatttgcatacagggtctttgcacacgtggttggttacaatgaggatgctggagggggtggtctgtgtccctgttaacaactcatgtccttaagagaaaagaggaacgtggacacccacacatcgggagacggccgcatggagacggagcagaggctggagtgacgcggccgcagaccaagggcgcctggagccccggaagctgggaggggcaggaagggtcctcccctggagctactccttgacctcagcttcctgtggcctccaggacagggacaggctgctctaagccacccagtttgcagcactgctgcggccgccacgagaagctcgtccagggaggaggctgctccagccctgagccccacgcgactcccgtgagcacgaggactcgggtgccctggggtgaggcggcacgaggctgtctgtggatttccacagcatcccaggaggcgtctggaccgcagtggctccaggctgccaaccacgggcagaggccaccgctcccgagcttggaccctgccacgcgcaggcacaggccaggcggcgccggggaagcctgggggccccagaccggcccagcaccgcctgacatttctcaagcatgctgggggacggcccctcaatttaggatgaggacgaggtgggcccggcaggagggcaggagccggggtccagggcgagcaagttctccccgccccacgaggaacggcagtggccccggttgcctggaggtggaaggggcactgcagcctcaccgccccataccccaggagcccacgtgcttctctcacagggaaaggtgtactggccagactcagcgccctgaggacggggtcggaacccagcgcccaggaagctcccctccccccgaccaaggacctccctccaggtgggtcctctggaaactcaggcccgcggccatcacggcccctctcctgggagggctcaagggtgttggccgtgggggcttcacactgcaccccgatttcgagggaagcccctgcccatggcttccggggccttccggaggggccaaggggctggtgccatgggagggaaagttcccaagctcggagatggccaggagcaggaacagcttgagcgggtggccgaactgacagcttctcttgccaaacctcctgtcctgctccagcacaaagcctcccccgtgcacaggaacaggtgctaggacactgtggggacgtcccagatgccaggggcagtggagacaggaggaggaggaggaggaggaggaggaggaacaggaggaggaggaggaggaggaggaggagaaacaggtgctaggacactgtggggacgtcccagatgccaggggcagtggagacaggaggaggaggaggaggaacaggaggaggaggaggaggaggaggaggaacaggtgctaggacactgtggggtgtcccagatgccaggggcagtggagacaggaggaggaggaggaggaacaggaggaggaggaggaggaggaacaggaggaggaggaggaggaacaggaggaggaggaggaggaggaggaagaacaggaggaggaggaggaggaacaggaagaggaggaggaggaggaacaggtgctaggacactgtggggacatcccagatgccaggggcagtggagacaggaggaggaggaggaggagcaggaggagggaggaggaacaggaggaggaggaggaacaggaggaggaggaggaacaggaggaggaggaggaacaggaggaggaggaggaggaggcacaggaggaggaggaggaggcacaggaggaggaggaggaggaacaggaggaggaggaggaacaggaggaggaggaggaggaggcagcggcggcactgtgggtcttccacagggtgtgcccggaggaggtcaagactccactgccctgaagcaaacaaggcgtccagcccgagccagggtcacacgcccaacaggtaggatccagcaacccctgcgcagcagcccccgccatgcgagggaggacccggagttgagcgtggccctgcctgacatctgaccccgccgtcaggagctccaccaggtcagggctgctcagctgaccccacagccccaccaggcatggtcagcacggtgccgaatgcaggcctggaaagggaataaaggaggccctggggaggggccttggtgcttcatcccaagccaaccccgaaagtggaagccacagggccagggggacgtcgtggctgagatgcgagcagggtgccgggcacccccaaggcagcactgctgtccctgagaacagaaggaagtccaggcccagagtcagagccaagtggagtagtggtggttgctggcactcagtcccgtacccttggacagagcaagagtcccaagccaggaatgtgaggccgatgccttttaggaagaaaccacatctggggaaccagaccccagatcccagaacccagacctcagatcccagatcccagatctcagaccccagatcccagacttcagatccctagatcccagaccccagaccccagtacccagaccccagatctcagaccccagaccccagatctcagaccccagatctcagactccagaccccagatctcagaccccagaccccagatctcagaccccagatcccagaccccagaccccagatcccagaccccagatctcagacccccagaccccagatcccagatctcagaccccagatcccagaccccagaccccagatcccagaccccagatctcagacccccagaccccagatcccagatctcagaccccaaaccccagatcctagatctcagaccccagatcccagatcccagaccgcaagatcccagaccccagatcctagatcccagacctcagaccccagaccccagaccccagatcccagatcccagaccccagacccccagatctcagatcccagaccctagatcccaaaccccagatctcagaccccagatcccagacttcagatccccagaccccagatcccagacttcagatccccagaccccagatcccagacttcagatccccggatccccagatcccagacccgagattccagaccccagatcccagaccccagcccagagggaggcccggtgagggagtggaaaggagattccacgacacaaatgcttatgcggaaacagcctccaggccgggctgcggggctccaaagcagggtccccatgctccgagcgggcctcactgctacctggcggttaaaggcctgtccgcctggacagggtggtgcggctttctgtggcagccaagcagcttccacgcggcttctgctgctgtgaggagcccgctcgggtcttgtgtttattttcagtcttttggggccagtgcggtggcccgtggctgtaatcccagtgctgggaggactgcgtgagcccaggaggtggagaccagcctgggcaacagagcgagaccgcaactgcacgcgcacacacacacacacacacacacacacacacacgctaaaagccacacacgctaaaaaccttttaacatgctgagcttgagcctgtggtcccctctaacctacacgtctttttctcctgagcagacgttaagctaaatccccactcactccagacttccggtcctttgaaatggaggtgcccttgtgtgtcttcaatccatgtggagggtagtctggcccatcccacacctgctactgtcactgcctcacatcagcggcctcaggccacaaggtctccccacctggctccttggggagtgccaagcgttgccagcagccgggctatgctgatcccagacaagtggctcgaccggtcaccactgtccttgagcttaagtccagccttggtgacaaaaatgtcacaaggacctgcatccgagccctgagggcatcaggtcctggaggaggaggaagagtcccttctggcttcgggctgggcttgaggacggcagctccaagaccgcttagagcgagacttcagcgctgactgctggagctacgcaccctgtcctgacaatggccgcacagttaggcgctgctccacgcctggaggagggaactgagggcccgaaatcacagaagcaggaactccaggttcgccagtgcggcctgatccaccttccctcaaacgtagctgctgacaacgacacccacgcgccctctctgggcccagcaggtcagaggtccaggtgggctggctgctccacggccacggctccaaggccaaggtcaaggcactgctgtcctgggccctggtctgggttctccgggagagtccgcgcctgagctcggccgggggcgggattctgctccctgtggccactgggctgaggccccacttccctgctttcggggagccacgtcccccatcacgccatccctccctcctaaaagccagcagggcaaggtccctcttaggcttctgacctgacctcccctcctccagctggagaagggtcccacgcatgaggacatttgtgacgatgccgggacccgaggaatccaggacgacccctctgcagagcccctgtgccccgggaggcaccacacccacggctccagggggtgggggggacggtggcttctctggggctgacccagacctgcagtacacagcgccaggccatgaggtctcagcctgcggtcaggccgcgtgcacggaaacccaggctcctgaacggccagccaggagcaaagccggccactgagtacgggagcaggctccggggacacgctcccactccttttaggggcccagaggctgtggatgaggagctcgagtatccccctctcagtgtaacctccccacccctcccacatcctccaagtggggcaggagccgcctcaccagagctgggggagggggccacacaggtgcacccctggggaggggcagcggagacttgtgggcaggaatgtggccagggtttctagatcatctggtttttcaagagaagccacaagtctgcgtttgagggtggcagcccctggtgttccaaagtcggcaagcaattcaagcatccacacccccaccccggggcagcgttgggtgcccagacctcagggccaccccgagagctcctgcatccacctgggggctcgcagctcccccaagctcctggcgggtagcagtcattccaggatctgataaaagcccccgaaaatgccccggtcagcccagccacacccgggcaacaccgacagccattctccaccagggccccagcgcccagctgagtgagacccacccggtagcttccggggctgggcccctgccccaccagtgaaaacattctggtcacagtgatgccgccctgagaagctcctcaccgtcccccgtggccttggaacccccctcacacccatgggttccaggcaccctggcggctgtctgtccccacgaagcctggccctctcacagcgtagggaggctgcggtcaccagcgtgggtcccgcgacccattccacccggcccctgggcaccggaagccaggcggcgagcgcagcagaccccagaggcagctttcctcagtttacctgacatgcaaaggaagacgcctcctcactccaggctggacgggcagccgacggcggtccggggccatggcgggcagggactttctccgtgaccctccctggctgcccctccccagcaagtgagtcagttccagaaacgtttactgcccgccaggcccgaaggctcaccggctccccctccccacgccccagcacccagggccttggccccaggagcccacagcggcagagactcccaggaaacgcgagtgagccgccttccggaacctggcgcacatcactttcaaaacgcagcggggcctggaaccaaggccaaggccgcctctttcggtttcacttggacgcttgttcttgctggggatggaggtcaatcacaaggctccgggaagcacgggcacgagtcacaaagcaggtcactgagacagcggcaccaggcccgccagtccgatctgctgaccccagccagggcccagcactcccatgccctgcactgcacgaggctgcccgggacagtgcctgcaggggagatgactcggcaatgactctctgggcccctcctcccaccccatcactcatggggttgtccagggcaagaggcccaggggaatccgcaggagagccagggcacagggcacgagtgcggccccaggctgaggcctccgtgggactgagcttcagggccacgctgccatgctgagctctcacggggcctccgcctggaccaccaggcaccctcaggctgactggcccctgtgtgccacccatgtggcccaaggcctgtccccctcatgccaagagccccgtagggccccttcgagtagaatgcagcattccctgcccctccgaagcagtgagtggttcaggggcagagctgggcctgggcgaggggcccccggggggtggggtgatgccatcactgttgccgtcctacgggttgagacaggacagctgcccatcaccccttgatgcaagctggctgcaggctgcctgaccagttcccggggacaccgtgctcaaccctgtggtgacaactggggattccgaaggacagggaggtcttactttctgttaaacacttttattttccctgagatacaatccacaccaggaggggcacctgtccggagcatatgactcaacggtttcaacgtattctaaggcagaccaccacagcttctaattccaaaacattccgctcccccaaaacacagccgtgtccccaacagcagtcactcccccgcctctacagcccctgcaaccacacgcccacttctcttctgtggactggcctgctctggacacgtgaccacacgtctaccccccatctgtggactgccctgctctgcacacgtcacatgaacggagtcacgtgccgtggccttttgcgtctggcgtctctccgcaagcacgtctccgcagagcatccatgccgggcgcacagacgacagatctaatctccgcctcctcacggggcccaggaggcccagggcgagagctgatggggcccacgcatccgaaatccccgtcttggccagaaccccaggtttgccttcgcccgcagggctgagccctctcctgagtcctgggccctgtgacgggtgaccacacctcccagcagggaggcaaggtgaccacggggctggcagtctgctcttcgtcccagcccgagggtgcaggtgccggccaacctcccgggggttgggggcgagagtgcagaggcgaggggcaaggctgagagtccacccacactgccgggcggacagcgggcaggccaggacgagaaccaggttggggtgacctcgcttttaggcttcaacccggcagctggacacacccagccctccccgtgtgctgtctgaccacacagccctcggctgtggaaaaagtgactggaggtattccaggcctgcccgcaacaaatcacacacacatgcacacagggacaggccacacacgtgcacacaacacacgcacacatacaaaacacacgtgcacaagacatgcacaagcaggggtgcatgagaacacgcagcacgcacacaacacacacaacggacacgtgcataacggacacaggtgcacaggcaacatgcgggcacacacaacatgcacacaaagtacacgtttgcatgagcacgggtgcaaaggtcatacacatgcacccacaacacaaacacacacaaaatacatgtgtgagcaacacacgcaagcatgggcacatgggcacaggcaacacacacatgagcacacacacaaaatacacacaaccaccaaaatacacacacacaacatacgaggacaggcacacaggcacgggcaacacacaaaatacagacacacataaccgactcatgaacatgggtacacacaggcacacacacaacacaaacacgggtgcacaggcacacacaacacacaaacacggatgcacagacacgcacacaatgtgcacccataaaacacacgcgtatgaaacacacgagcaacacacacatgcacaggagcacacagccacaggcacgcacattcacacacacacaacgcacccacatccgtacaacacacacacagaacgcgcacacgtccgtacgacgcacacacagaatgcacgtgcgtacgtacaatgcacacaaagaatacacacatccatacaacacacaggcacacaacacacatgtgcatgcacatggcgcaacatacagatacacaaagacacgtgtacacacacatgcagagtccccagggcagcgctggcgtcatggggggctgcctccacaccgcctccaggagtgtttacagctgtggattacatgataccgcccccttcccagagctgatcccaccccccagcatgggggccccctgggagggggcctctgggagccggactggttctgtcgacacagtcgcctctttgttcggggcagagctcactctggcggtgttggcgtttccgcatgggccctgccggaggggcatccgtgactccgctggagccgggttgggccaagcccaagctggtcacacccctcacacccctggggttgggggaggccttaggcagcaagtgggtggggggtctaggggtggctggcgcaacctctctccacctcggtttccccgccaggtgagagggcagtgactgcccatggtcacgcggctggagaacatgcaccctctcctccgcacctgcacacctgggtgcctcctgtctagcccagactccaaagccaaccaagagtgaatggatgaacggagaggccagaccccaaagcaaactgagagtgaatggatgagggaagctcctgctgcctcttctgtgctctgacaggctccctccccctgaagtccagcccctgcctgcacagccccctccacaccagggccctcctggctcctggcaggtgtgggcagatgtctgccgggatcctcagagttaaacaaaagcctcctccctgtgctctgaaatcacactccaggggctggcaggcgccttccaagtccttccctctccaaggacgagagcctgcctgcgtctcctctgccgtctcccctgccgtgggaggccctgaggcccccatcctgctgttctccatcccacccaccaaggggtccagatctcaaattcgccctttctcggcaagaactctgaaggtggcccggagcaggccactgtgagaagccatcaccccacgaccagggtcacccctgggaaaatctggggccgggcagccagatccctgaaggccagaggatgtctgggaagaaagggcgtggacggcacctgctgggcctgccacaaactctctgggtcccatgtccccgctgctcctcttccagggccgagtcagggagagacatcccagggagggcacccgaaacagcacagcacccctcagtcaggaagcagtgccggctgccctggcccggaggaagaggcctggaagaaagtttgaagcctgtaatccccgtgtaatcgggctggctgcccacggggtctgcggccctgggtcctcggcccctcccatgctcttctcttgaacctcggcttcctctgcccctctgtaaaacactcactgcaaccgccccccccgccccggcaaactggcagccagcatcagcacaggccagctccgaggccgggcactctcgctgacagggcgtgcaacagatggcaccaaacctatcccgtcccgtcccagcagtcacaggcaggaaggacgttctgagcaggcgggaacaacaggcattccgggaagaagcagccaggggaggccccggctacacatttaagagattttttttttttttttttaacttttcagaatgttaatcagttcatccagggagacacccaccgtccctgccccagcaccatccgtgcccggcgtccctggaggcgctgggtgggctctccacaacgcctgccccccacgccccaggtcagtctggggattggtccctccaggccccacctgccttattcttcgggactctggggtggtgggaagagtgccctacgggggacaggacccaccaggaggcctgcgcttccccttcaccgacacacgctgctcccgggccccactcgggccatctcagcccgctaccctccctcccgcctgtccctggaagccgggtttgaatgcgacccgcactcccacccccaacacgctctgcagactccgcccagacggccccggggtcacctaatatcagcaagcccccatcccaaaccgggggacctccatgcagaaaccgaaaaaccatctgccccagaagagaagtcggaggccccaggagcgggaggggcggggagcaaggggagggagggagacagggctgcgctgcggggccgagaaggcaagggtcctgggaccggggacaaggaggaggaaggggcacgaacgcccgaggagcctggagtcaggaatcggggcggcgggagagaccgggggtcactcccaggaaggggtcgaggtcacgaggcgcatggagtcgagagtccccaaaagggaaggccaggataccgaggaaaagcgggtgcggggtcaccaaggggctcgggggcaccgatgagtgcggggtcaagggttaccagaaaacgaaaggtcgggggtcaccaagctgcgcggtacagggagtcacccggaagagcgggaaggaaaggttgggagggttgtcgtggaaggtagggttaaggttcacggcagggggtcgccggggggcgggggggcaggtcaaggttcacggcggtggtcgcggggcagcgcggggtcaacgttggcggcgaagggcggggtcggaaggggtcgcggcggagggcgggggtcccgccgcgctcgcccccgccccacggcccccagaacccccagccccgggcgcaggggtccgcggggagcgccggacccacaagcggggtcgggccaggcaggggtcgcggtggagccggggcgggggtcgcaaccagagcctcacctcgggcccgggtccggccgggcgcggagcccgcggcgcctgtttctccgagcctcgcagctgccgccgctcacttccgggtttcgggcgccatcttgggggccccgcgcacttccggtcatgccgcggggcggggcctccacctgcgggggcgtggtctcggttcgggggcggggccaccttccaagccaatcccttgaggtccttccgctattcggaaggggctgggactcctacggctctgggttcgaatcccgccctgcctggttctcttgagaccccagcatgtgctttcacctcctcaagcctcagtttcctcttctgcaccgtgctggtgaaatggaatctgctttgtggtacagcatccccttttttcctccttcctcagaaccccctccaagcctctgcatgtgccacgtcccccactggggctcactcacccgagacttttaaactgagactccctcaaaagctactaagacgatcaccagccgggcgcagtggctcacgcctgtaatcgcagcactttgagaggctgaggcggatggatcacttgaggtcgggagtttgaggccaacctggacaatatgatgaaaccccgtctctactaaatatacaaaaattagctgggcgtgatggcgggcacctgtaatcccagctactcaggaggctgaggcagtagtatcgcttgaacctgggaggtagttattgcagtgagctgagatcgcaccactgcactccagcccgggcaacagagtgagactccatctcaaaaataaataaataaataacgaaataaaataaaatgaaataaaatcatcacctctgggcctgtcagacatactctctcacgaaaagttatctctgttcattaatctctctccctaaccaaatacagttctggacgcttcagcatggtgactggcacatgggggtttgggtaagtcccaggggctacccccaagagagcaggatcctttcaggcagggccacgggggcctgaggggctcctcctctcggtggctgtggtgggaggctgccctgcgtggggagctggagtctcagggcacttttcctgtgacttgagccagtgaaggcagatccagtgtgggaggcaccaccgcctccccagcccaatttcagccatgacaatactgatacagctccctggacccaagcagccacaagccagaggcctctgcccccattccaaccccctgaaactagagttgatttctccatgactttgttaattcattcagtgacttctaatcgatgctgctctgtgcttggtcatgagctgggaaaacccagggtctcacagaggactcagctgtctgtcccaacatcagaaagcccctggtctaggggagagagaaccaggaccagacactccaatatgcgggatctctgggagggttgaaatgtctgcctagggcttcatagagggctgcatgctgaagagtgtgttgaagctggggttttgaagttcaagtaggagtgtaccaggtagacaagagtaggaagaacagtccgggcaaagaaggcctggtaaggcagataataagcaggtttaagatattttagcacctctctaaaaaactgaggccaaaagccaggcacggtggctcacgcctgtaatcccagcactacgggagtctgaggcaggaggaacacctgaggtcagcggtttgagaccagcctggccaacatggtgaaaccccatctctactaaaagtacaaaaaagttagctgggcatggtggtgcctgcctgtattcccagctactagggaggctgaggcaggagaatcgcttgaacccaggaggtagaggttgcagtgagctgagatcacaccactgcactccagcctgggcgatagagtgaggttcggtctcaaaaaaacaaacaaacaaaaaacggtggctcacgcctgtaatcccaacactttgggaggctgaggtgggtgaatcacctaggtcagaagttcaacaccagcctgacgaacatggtgaaaccctgtctctactaaaaatacaaaaattagccaggcgtggtagtgggtgcctgtaatcctgactactcaggaggctgaggcaggagaatcacttgaatctgggaggcggaggttgcagtgagctgagatcgcgccattgcactccagcctgggtgacatgacaagaccccgtctaaaaaaaaaaaaaaaaaaaaaatttcaggccaaggacccctgtcatcaaacccaaaagcacaagggggcagatggggaaactcagacccagaaggcagaagtgatatgtccagagtgagatgcagaaggcgcacaaggacattttgtccttcagctcattgggggtctcctttacccatggtgacagaacggcgtccacctgttgtgagcttttcctcagagtcccgcagagcagccggacccgacagagatacttc[132 bp omitted]cct[175 bp omitted]cccggccaaatctccttttttttgagatggagtcttgctgtgtctcccaggccggagtgcaatggcatgacctctgcctcccggttttggcaaactgggtgctcatctcaactttgagactattttctcttttttttgagatggagtttcactcctgttgcccaggctggagtgcattggcgcaatcttggcccactgcaacctcctcctcccctgttcaagtggttatcctgcctcagcctgccaagtagctgggattacaggcatgtgccaccatgcccagctaattttgtattttccgtagaaatagggtttc[133 bp omitted]gttaaattgagcaataggcactaaagatttggaagggtgaggaagccagcctggggactggagggtggcggctgcatctgctcatttcctcccacactggaccatccacacaacttttgaggatcagtggaaatgaaaacacggtgccccggcacaaaacatatttcatagcttgggttaggcaacagcaaagcatcacgctgagcgccgggaccttctgagtgcaggcggtgggcgaagccccgagtcacacacacccacgacgccggccctgctcccacagcggccctctggggtagcgactggtattacctgcatttcacgagggaggaaactgaggcacgaactgttcagaagctgccctgaggtcaccaagtgagctaggaagaggcgtgggctcgatctctgccacatccacctcgggaaaccacaaggtctcgatgggtgattttgcctaaagtgggggcagtttgcccaggccggggtgggtccagccatctcagcaggcaggaatctgccaagttgggggatgcttagggaattagtcagatgcggggatttccagggaatcacagggggtggctccggaaagcagcagggacacagtactggggctcatggcccagcctggagtacagtgctgtgaatctgctgtgtgacccaaggagagttacttaacctctctgtgccccggttttcccacctataaaatggggagggtgataataatagcaactagtggccgggcacggtggcttatacctgtaatcccagcactttgggaggctgagacgggaagatcacgaggtcaagagattgagaccatcctggataacatggtgaaaccctgtctctactaaaaatacaaaaataagccggacatgatggtacgtacctgtggtcccaaccactccggaggctgaggcaggagaatcgcttgaacccgggaggcggaggttgcaatgagctgagatcgcaccactgcactccagcctgggcaacagagcaagactctgtctcaaaaaaaataataataatgataataataataatagcaactagctgctaggttgttcagacaactcaatggacagacagtgcctaatagaatttaaccactacgaatatttccaaatgaaattctttttttttttttttttgagacgaagtctggccctttcacccaggctggagtgcaggggcatgagctcaacttagtgcaacccctgcctcttgggtccaagtgattatcttgcctcagcctcccaagtagctgggattacaggcacgtgccaccatgcccggctaatttttgtattttcagtagaggcagggtttcaccatgttgaccaggatggtctcgagctcttgacctcgtgatccgcctgccttggcctcccatattgctgggattccaggcttgagccaccctagggaaattcttgattttcctcggcccagtccatggcgtcactgaagtggatgttcaatgagaaaataataaggatgaatgctgcagttggagttcaagagaggaggcatttttgacgccacagatgggcagagatggggtgagggccctggccggcaccagctctcctggctcagactttggaagccgccccccaggggagacgctcaactggtcagaggtgtggatagccccgtcccccagtagtcccaccccgcagagagctctcaggcttccagctctggcccaggcccaggtcctcggtgccatgtgaagggtggagagctctcctgggggacagagttgtacatttgtggaggttttctggtggggctgtgtttgacgtcaacactctcctccctaaaccctccctcttccccatcccatacaggtcctcctaaatgtcttcccagccccttcgagagaattgtggaagtggggttgccagatcaaacacaagacacccagttaaaattcaactgtaggtacgtgacgagtactttttgttgctgctgctgttgttgttcttgttgtttttgagacggagtctcgctccgttgacaagaaggctggagtgcagtggcgcgatcttggctcactgcaacctccacctcccgggttcaagtaattctctgcctcagcctcccgagtagctgggactacaggcacccgccgccacacccggctaattttttgtatttttagtagagacggggttccaccatcctggccaggctggtcttgaactcctgacctcgtgatccacctgcctcagcctcccaaagtgccaggattacaggcgtgagccactgcgcccaggctttgttgttgtttgagactgggaatcaccctgtcgcccaggctggagtgcagtggtatagtcacagcccactgcagcctctgcctgctgcgctcaagcaatcctccccagtcagcctcctaagtagctgggactacaggtatgcaccaccatgcctggccaatttttttactttttatagagacggggtttcaccattttacccagattagtcttgaactcctgagctcaagcagtcctcccaccttggcctcccaaagtgctgggattacaggcatgagccatcacacctggcccatttctttctttctttctttctttctttctttctttctttctttctttctttctttctttctttctctctttctttctctctctctctctatttccttctttctttctttctctctctctctctttctttctctctctctttctttcttttttttgtagagatggggtcttactgtgtcgcccagcctggtctcaaactcctggcctcaagcaatccacctgcctcggcctcccaaaatgctaggattacaggcatgagccactctgtccagcctgtcttaattatttcaaattgcagaaaacttcagacaaacatgaaggttgtttgtaaggaccttcttgggctgtgcctcagtttccccatctgggagatgccagcctggattcccctcccggcctcagtgtctctcctgggcggcaagaaggaccctgggactgtgcccactctgccgtccagggggccgagggaggtgcccagggagggggaggtgcgtggtggtgacgggcggctcccgcacagagcctcagacctgggcaggtgaggcaggcaggtgggtctggcccggcgcggcccgatgcgggggcagggatgggatggagccacttcctgtttctccacattctggaaagtccctgtgttcccaggcagagggggcacctcctccctgccagccctcctgggcgccgggctcctcaccacttctccttcctccacccacttccccagcggacgggcctgggacccgccccttcccctcctgcctctctcctcttttctttcccaatcaggcccttcctggtgtgcagaagggaaagctgattccacagcagctgggcctgcccgacccaggaggctacatctgtcacccctctgtctgtctctgtctctgtctctatctgtctctctgtctctctctgtctctttctctgtctccttgtctgtctgtctctctgtctccatgtctctctgtctctctgtcttcgtctctctgtttctggctctctttgtctctctgtgtctcagtttatttctgtctctttctgtgtctctttgtctgtgtctctgtgtccctctgtctctgtttctctggctctggctctgtgtccctgtctgtttcttttttttttttttttttttttttttgagagagtctcgctctgtcccccaggctggggtgcaatggcgcgatctcggctcactgcaagctccgcctcccgggttcacgccattctcctgcctcagcctcccaagtagctgggagtacaggtgcccgccaccacgcc[187 bp omitted]tgtctctgtctctgtgtccctctgtctctctgtttgtctctctctgtgtctgtctctgtctccgtgtctctctgtctctgtctttgtctccctgtctctgtctctggatccctctgtctgtttctctagctctctctttgtctctgtctctgtttctctatctctgtctatctctgtctcagtcccttcttttgccaccatccccctcccgtggccgccctcacgtgtcagcaccataccctccctgtggtcagggccacctgctccagggtgtcctcaggtcggtgctggccggcgtgttcccgggccctgcagccacctgcttgaccagggccaggcccagagtgagatcctaccaggccaggtcggggcagcctctgtgccaagacaactttagggaacaacaaacctgtctgacgggtttgagattccacatgggacaggctttctcacctccgcactgacgctaggacagctgggttgaaggggcccagtgacacccctgacatagcacctcaggctgggtacaggctgcagcagcctagtctgggtcagggctgtgtcctgaggttggggcacccagggcaggctgggtgaaggaagatcagcaatctgccggtcgccctgtgcagggaggataaacagggagaaggcactgcacatgcaaagtctcagcggggacaaagactcaggggagagtgtgcggggcctggggtgtgaggatagatggactgggagagagagaggggaccctggagggcctggaagctagacgtggcctgtattctgggggcactagggaaccattgagggttctggagcaacggagtggtacagtcatggtggggctagcggtgtactggatggggtgaggcacagggaccgaatttcagatcagaaggctcatctggtagtcagactgaggccggaggaggctcaactgccccgaggatgaagaaaggagccaaacttggccgggtgcagtggctcacgcctgtcatcccagcactttgggaggccaaggcaggtggactgcctgaggtcaggagtttgagaccaacctgccaacacggtgaaaccccgtctctactgaatatacaaaaaaattagctgggggtggtggcgggcgcctataatcccagctactcggcaggctgaggcaagggaattgcttgaagcagggaggcggaggttgcagtgagccgagatcgcaccactgcactccaccctgggtgacagagagagcaagattctgtctcaaaaaaaaaagagccaaactttgaacttcttttttctttctttcttttttttttctattttgagacagggttttgctctgtcgcccaggctggagtgcagtggtgtgatctcggctcacagaacccttgaactccttgcctggagcaatcctccctcctcagcctccagagtagctgggatgacaggcgcaccactatgcctggttaattttaaattttgttggccaggcgcgatggctcatgcctgtaatcccagcactttgggagaccaaggcgggtgagtcacctgagatcaggagttcgagaccagcctcaccaacgtggtgaaaccctttctctactaaaaaaaaaaaacaaaaacaaaattagccaggcatggtggcacgcacccataatcccagctactcgggaggctgatgcaggagaatcgcttgaacccaggaggcggaggttgcggtgagccgggatcgcaccactgcactccagtctgggcgaaagagcgagactccgtctcgacaaacaaacaaacaaacaaacaataaataaataaataaaccttgtttgtagtgaagaggtctcactgggttacccaggctaatcttgaactcctggcttcaagtgagcttcccacctcggtctcccaaagtgctgagatgacaggtgtgagccgctgcacccggcctgaacttcctatcaggtgctcattatgagccaggattgagctacagaaaatgcgagggaggggagacggcccccaggatgcccccaaaccggtactctgcaccccctgggcccacatctaaggacgacaaggcagaggcctcaaatgccaggtcctgtggctttgtccccggggcggtggggagccacgggcagaagtagggcaccagaggagattgctctgccagggctggggccagagcaaagggccgggggcagggcaggggcgttggatcgttggatggggctgcaaggtggggagggcaggttggggccatgtattcatccgagatgaatttctcagtgccacccagggccaggccccacttgcaggtgccagggccactacagagaacagacacaccctgagggggtccccaggccacgaagaagccggatgctggagcagcctaggacacagacaccttggcccttcccaggcaggcccctgccacgtgagtgcagggcaagggtcccaggagggggaacgggctccaggccccaccatggctgccctgagtgtacgcagtggtcagcccagtgctgatgtcacctgtgtggggacttcctggaccttcacctcggatccgctgcccggccccgagggaaattccagagaagccagggccgctcctggctgactcattctaggtgccagtagcacgggaggggctgggcaatggagggcctgggggcatttggagaactgtgaggagtctgaccacctcctctgagggccagtttctgctgcgtcccacggggacttggggaaaacttggactccccagccccagccctggcatcattttttttttttttttgagacagagtttcactcttgttgcccaggcatgggtgcagtggtgcgatttcggctcactgcaacctcagcttcccgggttcaagtgattctgtcgcctcagcctccccagtagctgggattacaggcgcctgccaccgcgcccggctaaattttgtatttttagtacagacagggtttcgccatgttggccaggctggtcttgaactcctgacctcaggtgatccacccgcctcagcctcccaaagtgctgggatgacaggcgtgagccacagtgctcagcccaggccagcatctacagggcacaagtgggaatctgggttctaggaggtgagaactggggggtggggggttgcaatgggtggagagtgctttcccttccctgcaggccttctcacgtccacagggttgcaagcgggactggcagagttgaaacaaaagtcagggagcagggctgggcgcagtggctcaagcctataatcccagcactttgggaagccgagggaggctgatcacctgaggtcaggagttcgagaccagcctggccaacatggagaaaccccgtctctacaaaaaatacaaaaattagccgggcttggtggcgggtgcctgtaatcccagctactcgggaggctgaggctggagaattgcttgaacctgggaggcggaggttgcagcgagccgaggtcgcaccactgcactccagcctgggtgacagagcaagactccatctcaaaaaaacaaaagaggagtgtgggaacaagtagtgaagatttccaccgttcaaatcccgccactcccccccggggctctgtgacctcaggaaggcacatgacctcccacacttcagtttgcccatctataaaatgaggataatcgtggtacctcctttggaagccttttgtgagaatttggtaagttctggtatgtgttaagtgtttggagtggggcttggggtatggtgaag[137 bp omitted]aagccctgtctctagtataaatacaaaaattagccgggggtggtggtgcacacctatagtcccagctactgaagaggctgaggcaggagaatctattgaatctgggaggcagaggttgcagtgagctgagatcgcgccattgcactccagcctgggcgacagagccagactccacctcaaaaaaaaaaaaaaaaacaaacaagaatcgtttggttgcagctgacagaaattgaaactacaactggctcctttttaaaaaacaggaattttttgctcatggaactgaaagatttagggatagagctaactcaaggccacccctctcagcaccgttgatgttctggaaaggaccattcactagggtgggggccgtcctgggcacacagggtgctcagcaatgaccctggcctccacccagtcaacgtctgtagcgtccccacccggtcatggtgaccaaaaacatctccagacattgctgagtgtcccctgggggtgtaatcacccttggttgagccctactggtctggcgggtttcagacacagctggatccaggaccctcggtcagtgtcacaaggatgtgtccaattctccatc[132 bp omitted]ctgcaacctctgcctcccgggttcaagtgattctcctgcctcagcctcccgagtagctgggactacgggcgtgcgacaccatgtctggctaatttacgtatttttagtagagatgggcttttgccatgt[137 bp omitted]ggaaaagatgatgccataagccccaaatctcatctgcccatcatcttaacagccctggcaggagtcaacacctcttcccaaggtgggggcaccaaagtgccagggaggttctcattcgcccagcctgggtcacatgtcctggtgggctgtggcctggtaaggggatgcccagattggccaggcagggatcacatggttgtatggagtgagccaattgggtgaaaactcgtggtcgggatgggcacggcggctcacgcctgtcatcccagcactttgggaggccgaggcgggcagatcatgaggtcaagagttcgagaccatcctgggcaacatggtgaaactttgtctctactaaaaatacaaaaattagctgggagtggtgttgcatgcctgtaattccagctactcgggaggctgaggcaggagaatcgcttgaacccgggaggcggagcttgcagcgagccgagatcgtgccactgcactcccagcctgggcaacagagtaagactctgtctcaaaaaaaaaaaaaagtacaaaacatgagccgggcatggtgacgcacacctgtggtcccagcaactcaagaggctgaggagggagaatctcttgaaccaaggaggtggaggttgcagtgagctgagattacatcactgccctccgg[141 bp omitted]tggtgaaaccctgtctctactaaaaatacgaaaattagctgggcatggtggcggatgcctgtaatcccagctactcgggaggctgaggcagagaattgcttgatcccgggaggcagaggttgcagtgagctgagattgcgccactgcactccagcctgggcaaca[218 bp omitted]gaggcaggagaatggtgtgaacccgggaggcagaggttgcagtgagccgagatcgcgccaccacactccagcctgggcgacagagctagactctgtctcaaaaaaaaaggaaataataataataacaaaaaacaaaaacaaaaaaaccctcctctatggacagaggcatgattggcaggggtgggatagctgttggcaaagaaggcccagctgtgctaagcaggccacccatcccatggaagggctggcatggaggcagcaccagtagacatcagaggatgaatgagtgggatccagtgctgctcaatgaatacatgcgggttgttttgtttttgtttttttgtttttttgagacagagtcttgctctgtcgcccaggctggagtgcagtggcacgatctcggctcactgcaacctccgcctcccgggttcaagcaattgtccagcctcagcctcccgagtagctgggactacaggcgcccaccaccacacccggctaattttttgtattttcatttgtttgtttatttgtttgtttgttttgagatggagtctcactctgtcgcccaggctggagtgcagtggcatgatctcagctcactgcaacctccgcttcccaagttcaagtgattctcctgcctcagtctcccaagtacctggaactacaggcgcccaccatcacacccagctagttttttttttgttttgttttttgttttttttgagacggagtctcactctgtcgcccaggctggagtacagcggctccatcttggctcactgcaacctctgcctcttgtcttcacgccattctcctgcctcagcctcccgagtagctgggactacaggtgcccgccaccaagcctggctaatttttttttttttttgtatttttagtagagacagggtttcaccg[272 bp omitted]ttgagacacagtcccgctctgtcacccaggctggagtgcagtggtgcgatcttggcccactgcaacctccacctcccaagttcaagcgattctcctgcctcagcctcccgagtagttgagattacaggtgcgcaccaccacacctggctaattttgtatttttagtagagacgggttttctcatgttggccaggctggtctcaaactcctgacctcaagtgatctgctcacctaagcctcccaaagtgcagggattacaggtgtgagccactacacccagcctcttttttttctttttctttttgagacagggtttcgctttgccatgcaggctggagggcagtggtgcaaacagggctcacaggcagaggctgctctgcctcctaggatcaagggatcctcccaccgcagcctcctgagtaactgggattacaggcacaagccatcatgcccaggtaatagttttaaggttttttttagtagagatggggatctcactatgttgctcagcctggtctcgaactcctggcctcaagtgatcttcccgcctcagcctcccaaagccttgggattactgggtgagcccccgtgcccagccagtggctgcttgcactggctggcctccaaagctgaaagtatttgctccctggcccttaacagaataggtgggctgacccctgctctatgtggttctttgtccccaggcaaggattcagggacatctcagagccgctggggtctcgtcggtaaagtggtggtggacggcatggaggaactttagccctggaccagaaactttaggtcagtctatgtcagccattgttgctatcagccttcaggtcgtctgggctgggaggtctcctccctcttcctccaggcaccagtgggagcaggcagtcacaccttcctgtgagtgagaaccatagcagaaccttcaaagcacctctcaagtcgggtgagtcagcagaggcctgcagacagggttgacgggggcagggtgtggggatgtgggagacccagactgggggccagcaaaggctgttcggaggaggtgaccactgagctatgacctgaatgagtgaacgaggcagttattttatttttttgagatggagtttcgctcttgtcgcccaggctggagtgcagtggcacaatctgggctcactgcgacctccacctcccgggttcaagcgattctcctgcctcagcctcctgagtagctgggattacaggcggccgccaccacgcacagctagttttgtatttttagtagagatggggtttctccatgttggcca[132 bp omitted]gggaggagcctttgaggtggcaggagggaaccagtcctgatgagggaagattaaaggacagtggggctggggatggtggcccacacctgtgtttgcagcactttgggaggctgaggcaggaggatcactagagcccaagagttcaagatcagcctggcctacaaaaaaatatttaaaaatttgctgggtgtgggaggctgaagtcagaggatcacctgagcccagggagttggaggctgcagtgagcggtaatcatgccactgcacttcagcctgggggacagagtgagaccctgtctgaaaaaaaaaaaaattgggccaggtgcggt[169 bp omitted]gaggcaagagaatggcctgaacc[143 bp omitted]gaggcaggagaattgcttgaacccgggaggtggaggttgcagtgagccgaggtcgcaccattgcactccagcctgggcaacaagagcaaaactccatctcaaataaataaataaataataaaaaaataaaaaataaagagggtgggcatgatggctcaagcctgtaatcccagcattttgggaggctgaagcaggtggatcacttgaggtcaggagttcgagaccagcctggccaacatggagaaaccctgtctctactaaaaatacaaaaaataaaataaaataaaataaaataagccaggtgtggtggcgggtgcctgtcatcccagctaactgggaggctgaggcaggagaatcacttgaactggggagaaggaggttgcagtgagccaagacagctgcactgccctttaacccaggcaatagagtgagactatgtgtcaaaaaaaaaaaaaaaaaaggacattattagagttggaaggaaatgaccataggcccagggttccacggtccagaccaccacacacaactgatgcaggatataaccgagtcattccatcccaggtaatacccaagtacccacgggaggatcaacatccacggaaaagcctgtgtacaaatttcatagtagcaaatgcttctcctatgcgtcttttttttttcttttttcttttttttttttttgagacagagtcttgctctgtcacccaggctggagtgcagtggcacgatctcggctcactgcaagctctgcctcctgggttcaagcaattctcctgcctcagcctcctgagtagccgggactacaggcgcgcgcc[131 bp omitted]caccgctcccggacacgtctggctaatttttttgtatttttactagagacgaggttttgccgtgttccccatgctggtctcaaactcctgggatccagtgatccacccaccttagcctcccaacatgctgggattacaggtgtgagctactgtgtccggcccaaattgtctaatttttaaaaatagtttctgggttatggatctgaataaagcgtgcaattagtgaacagtttataaacctcttgtgtgcttttaatttattttattttatttatttatatatattttttgagacagagtctcgctctgtcacccaggctggagtgcagtggtgcgatctcagctcactgcaacctctgcctccagggttcaagcgattctcctgcctcagcctcacgagtagctgggattacaggtacctgccagtatgcccggctaatttttgtatttttagtagagatggggttttgccatgttggccaggctggtctcgaactgctggcctcaagtgatcctccctcctggccctgcacagtgctgggatgacaggctgagccacctcaccggcctcttatgtgccttttaatctgcaggttcgccctccctctctctttctgtggtttgtttttgtttttttttttctttttttcttttgtatgaaacccagttgtttttcctgttaagtttcccacagtctagaatttgctgatttttttctgtgataatttaagtttttgaatagtgatgcattcccgtgtcgtaaaactgaagagtcaaaagcatacccagactgcagccgctggggaagagtgtggtagctccacaagaagttaaacggaggcggggtacgggggctgggcgtggaggccgggcgcaggggcggatgcctgcaaccccagcacgctgggaggccaaggcgggcggatcacttgaggtcaggagtttgagaccagcctgactaacatagcaagaccccatctctacaaaaaatacaaaaaaattagctaggcatggttaactgctgtttttgtcaagatgggttattactatgttgcccaggctggtttcaaactcctgtcctcaactgactcagaaggatcaacttagcccaggagttcaacatagcgagaccctgtctctacaaaagaaatgttaaaaaaattaaccaggcctggtggcatgcacctgtactcccagctacttgtgaggctgaggtgggaggactgtttgagccatggagtctgaggctgcagtgagctacgattgcacctggaacccaggcctctcccgtctggaacccaggccctcacctacactgtcagcccctccacctggaacttgtagaacttacctgtaagcccaggcttcacctgaaaccccagtcccccacctggaacccaggccctcacctacactgtcagcccctccacctggaactttagaacttacctgtagccccagccttcacctgaaaccccagtcccccacctggaacccagtcccccacctggaacctgggcctccccaacctgtaacccaggcccccacctagaacctgggcctctgtgatctgtaacccaggccctcatctggaacctagggctctgtggaaactgtggcactcacatgtaaacctggcttccacctgaaaccccagtcccccacctgtaatccagcttgggt[144 bp omitted]aaacacgtctctaataaaaatataaaaattagctgggcatggtgatgggcgcctgtagtcccagctactcgggaggctgaggcaggagaatcccttgaaccgggagacagaggttgcagtgagccgagatcgtgccactgctctctagcctgggcaacagagcaagactccgtttcaaaaaaaaaaaagggaataaatgtcatgttacatatattttatgagaattctaaaatatattttatggcagggcacagtggctcacgcctgtattcccagcactttgggagtctcgctctgtccccaggctggagagcagtggtgcgatctcggctcactgcaacctctacctcccgggttcaagcgattctcctgcctcagcctcccgagtagcttggactacaggcgcccgccaccacgcccggctaattttttgtatttttaatagagacagggtttcaccgtgttagccaggatggtctcgatctcctgaccccgtgatctgcccccctcccaaagtgctgtgattacagacgtgagccaccgcgcccggcctattattttttactttttttttttttttttgaggcggagtcttgctctgttgcccaggctggagtgcagtagcatgatctcggctcactgcaaccaccgccttccaggttcaagcgattctcccgcctcagcctcccaactagctgggattacaggtgcccgccaccacgcccggctaatttttgtatttttagtagagatggggtttcaccatgttggccaggccggtcccgaactcctgacctcaggtgatccacccgcctcagcttcccaaagttctgggattacatgcgtgagccaccgcgcccggcctatttttcacttttttttttttagccgaatgtggcgaggacagttatcggattatttgcagcggatcctacacgtcccctcctcctgcctcttgccctgcgctcccgaaggggcctccggacccggaggatctcaccgcggggcggggtccacggcgagggggctcggccaagcgggcagcctcgcgcacgcgcactcaacccggacgcgggcctctccgccgcagcccgcgcccgccacctggcggccacagcggtccgcgcagaccgccggccccttttctatccgcgaccggatacctggcaggggtctaggaaagacccctctggctgctgcggggccagtgcgtgcgaggctcgaccccactccattgcgtgggggggctgagctaggtccgtgaagcggggcggttgcgatcaaggccccgactttttttttttttttttttttttttttttttttttgagacggagtctcgctctgtcgcccaggccggactgcggactgcagtggcgccatctcggcgcactgcaacctctacctcccgggttcaagcgattctcctgcctc[224 bp omitted]acgggtctgcggccagagagaggccaggagggaggactggcgggcatttctccgcagggtgggggtgaacgggggcctgggcatcggagccggggggaacgtggggtcagcgaggggttctaggggaggaaatggtaggagagctcctgccctgcaggctggagggcaggatctgtgtgtttggggggagtcatgggtgggtaggagagatgacaggtgacagcctggaggaagagatggagggaggcttgagccctgggcggggctggcagaagcccccacctataacttgggacctctgaacctggaacccagcccccacctgggacctgggcctctcccatctgtaacccaggccctcacctagaacctctgaacctggaacccagcccccacctgggacctgggcctctcccatctgtaacccaggccctcacctagaacctgggacctctgaacctggaacccagcccccacctggggcctggaacctccaccaggaacttgtgccc[224 bp omitted]gaggcaggagaatggcgtgaacccgggaggtggagcttgcagtgagccgagattgcgccactgcactccagcctgggcaacaaagcaagataccgtctcaaagaaaaaaaaaaggaaaacccagttccccacctagaacccaggccccgacctgaaacctgggcccctccacttgtaaccagggacccccacctagtatctgagcctctcccatctgtaacccaggccttcacctagaacctgggcctctgcaagtgtaacctggggttcctaccaggaacctgaggccctcatgtgtaacctgcggcccccgacctggagcctgggcctctctcatctataacccagaccctcacctagaacctgggcccctgcaactgtaacctgtggcactcactgtaagcccggacttcacctgaaaccccagtcccgcacctgtaaacctacaccccgccaggaacctgggcctctccaacctataattgaggccctcacctgtaacttaagcccacacttgtaacctggggctctctgctataacttggggcccccacccataagccagttcccttaacagaacctgcagtttggtgaggatgagagaatgcaaagaaagcattttccccaggactaccataaatagtcataagcatcactttttcctattaccatagcattaccatttgtcacggtttacccacccgaggtcactctgcctctttttcactttattttttttttatttttatttttttgagatggagtctctctctgtcgcccaggctggagtgcggtggcgcgatctcggctcactgcaagctccgcctcccaggttcacgccattctcctgcctc[224 bp omitted]acgggtctgcggccagagagaggccaggagggaggactggcgggcatttctccgcagggtgggggtgaacgggggcctgggcatcggagccggggggaacgtggggtcagcgaggggttctaggggaggaaatggtaggagagctcctgccctgcaggctggagggcaggatctgtgtgtttggggggagtcatgggtgggtaggagagatgacaggtgacagcctggaggaagagatggagggaggcttgagccctgggcggggctggcagaagcccccacctataacttgggacctctgaacctggaacccagcccccacctgggacctgggcctctcccatctgtaacccaggccctcacctagaacctctgaacctggaacccagcccccacctgggacctgggcctctcccatctgtaacccaggccctcacctagaacctgggacctctgaacctggaacccagcccccacctggggcctggaacctccaccaggaacttgtgccc[224 bp omitted]gaggcaggagaatggcgtgaacccgggaggtggagcttgcagtgagccgagattgcgccactgcactccagcctgggcaacaaagcaagataccgtctcaaagaaaaaaaaaaggaaaacccagttccccacctagaacccaggccccgacctgaaacctgggcccctccacttgtaaccagggacccccacctagtatctgagcctctcccatctgtaacccaggccttcacctagaacctgggcctctgcaagtgtaacctggggttcctaccaggaacctgaggccctcatgtgtaacctgcggcccccgacctggagcctgggcctctctcatctataacccagaccctcacctagaacctgggcccctgcaactgtaacctgtggcactcactgtaagcccggacttcacctgaaaccccagtcccgcacctgtaaacctacaccccgccaggaacctgggcctctccaacctataattgaggccctcacctgtaacttaagcccacacttgtaacctggggctctctgctataacttggggcccccacccataagccagttcccttaacagaacctgcagtttggtgaggatgagagaatgcaaagaaagcattttccccaggactaccataaatagtcataagcatcactttttcctattaccatagcattaccatttgtcacggtttacccacccgaggtcactctgcctctttttcactttattttttttttatttttatttttttgagatggagtctctctctgtcgcccaggctggagtgcggtggcgcgatctcggctcactgcaagctccgcctcccaggttcacgccattctcctgcctcagcatcccgagtagctgggactacaggcgcccaccaccacgcccagctaaattttgcattttttagtagagacggggttt[132 bp omitted]caaatttatgaattcaaggccaggcttagtggctcatgcctataatcccagctttttcggaggccaaggtaggtggattacttgatgtcaggagttcgagaccagcctgggcaacatggtgaaactccgtctttactaaaaatacaaaaattagctgggcatggtggtgggcacctgtaatcccagctactcgagaggctgagacaggagaatcgcttgaacccaggaggcagaggttgcagtgaaccaagactgcgtcactgcactccagcctgggcgacagagca[135 bp omitted]cccgtctccactaaaaataaaaaaaaaaaacctagccaggtgtggtggcgcacgcttgtaatcccagctactcgggaggctgaggcaggagaatcgcttgaacccaagaggtggaggttgcagtgagctgagattgtgccactgcactccagcctggacaatagagggagactccatctaaaataaatacataaatgaaaatgtgtagatatctacgagttcggtggggattcatacaacagtgcatctcattcccgaccgtgtcttatctttgatgacagggtcatcgttaatcctccatccagagaaatgggaagttagaggccaggacctcccagctgaagatttctgtgggacacagggctgggccagagaaaagggccctgcaggagacccttagaatagccgccgggcgactggccccacggtgccgggaaggaccctttgatctgattccgccatatgatccggttccgtgctggcccagcctggcctgggttggatgcctggtccgatgcccaaagccccatcaccctgaagcagatggagctggcatcctgaatgagactcctgggggctccagggctctcaggtgggagtcccagagccaccagggacctggagtgtagacctgggcagggagcttgctctctgccagctgcagtgggctcacctgtgagggaggatgttagaatagttcttttttaaaaaaaaaaattttttttttgagacaggatctggctctgttgccaggcaggaatgcagtggcgtgatcatggctcactgcaacctccacctcccgggctcaggtgatcctcccacctcagcctcccaagtagctgggaccacaggcgcccgccaccatgactggtgagtttttgttttttgttttgttttgttttgtttttgagacaagagtctcactctgttgcccaggctggagggcaatggcgcgatctcggctcactgcaacctccgcctcctaggttcaggcaattctcctgcttcagcctcccgagtagctgggattacaggcgccagccaccacgcccggataattttgtatttttagtagatactgggt[136 bp omitted]gtt[131 bp omitted]agggtcttgttctattgcccacactggagtgtagtgacataatcccagctcactgcagcctcaaactcccagcctctgttgatcctactgcctcagcctcccgagtagctgggactacaagcgtgggccactgctcctggtctattttcagttttttttttttgtttgtttttgagatggagtctcactctgtcgcccaggctggagtgcagaggcatgatctcagctcaccacaacctcctcttcccaggttcaagcaattctcctgcctcagccttccaagtagctgggactacaggcatgcaccactacgcctggctaatttttgtattttttaagtagagacaggctttcaccatgttgcccaggctggtctggaactcttggcctcaagggatccgcccacctcggcctcccaaagtgatgggattacaggcatgagctgccatgcctggccctattttcactttttgactcttgtgaataacgctgttttgaaaattcatgcgtgtttgtgtgaacaggtttctagttctctcgggcatatatcttggggtggaattgccagtacatatagcaactctatgtttaaacttttgactcttttccaaaggggttgccccgcttatgagaattctggtttctccacatcctcaccaatacttgttatggtccatctttttttgttatttatatattttatctatttttatttttttgagacggagtcttgctctgtcgccaggttggagtgcagtggcgtgatctccgctcactgcaacctctgtctcccgggttcaagtgattctcctgcctcagcctcccgagtacctgggattagaagggtgcgccaccacgcccaactaatttttgtatttttagtagagacggg[145 bp omitted]gctatgttgcccaggctggcctcaaactcctaggctcaagagatcctcccaaagttctgggattacaggtgtgagccactgtgcataaccctgaagtggttaattttaataatacatttactttagcctaacatatccaaaattacatcatttcaacatgcaatcattattaaaattattaatgagatattttattttatttttatttatttatttttttgagacggagtctcgctctgtctcccaggctggagtgcggtggcgcgatcttggttcactgcaagctccgcctcctgggttcacgcctttctcctgtctcagcctcccgagtagctgggattacaggtgcccgccaccacgcccagctaatttttgtatttttagtagagaccaggtttcaccacgttggccaggatggtctcgaactcctgacctcgtgatcagcccaccttggcctcctaaagtgctgggattacaggcgtgagccactgtgtctggccagtgagatattttatttgtgccctttttttttttttttgagaccgagtctcactgtgttgcccaggctgcagtgcagtggcacaatcttggctcactgcaacctctgcctcccaggttcaagcgattctcttacctcagcctcctgagtagctgggattacaggcgggcgccacgacacctggctagtttttgtatttttagtagagacgggggttttaccatgttgcccaggctggtcttgaactcttgacctcaggtgatcacctgccttggccccccaaagtgctgggattacaggcaaaagccgccataccaggcccatttttttttctttcgagacggagtctcattgttgcccaaggtggagtgcaatggcaagatctcagctccctgcaacctctgcctcctgggttcaagcgatcctcctgcctcagcctcccaagtagctgagattacgggcgcccgccaccacgcctggctaatttttgtatttttagtagagacagggtt[134 bp omitted]aattcagtgtgtagggcaggcatggtgcctcatgcctgtaatcccagaactttgggaggccgaggcaggtggatcacctgaggttaggagttcgggaccagcctgaacaatatggtgaaaccctgtctctattgaaaatccaaaaattatccagccatggtggtgtatgcctgtagtcccagctactccagaggctgagacaggagaattgcttgaatctgggaagcagaggttgcagtgaaccaagatcatgccattgcactccagcccgggcaacagagcgagactccgtctcaaaaaaaaaaaaagagagtcagtgtggagggaagtgtctctgttgggtccgggtgctctgtgggactctgaggaaaagctcgcaccaggtagatgctgttctgtccccatgggtaaaggacaccccaacaaaccgaggagcaaaatgtcctcgtatgccctcttcgcgcagacctgccaggaagagcacaagaagaaacacccggactcttctgtcaatttcgtggaattctccaagaagtgtttggagagatggaagaccacgtctgcaaaggagaagtgaagtttgaagagaaggcaaaaagtgacaaagctcgctgtgacagggagattaaaaattacattcctccgaaatgtaagaaagggtaagaaaggaaagaaaaaggatcgcaatgctcctagaaggccaccatctgccttcttcctgttttgctctgaacatcgcccaaagatcaaaagtggacacccaggcctatttgtcgtggaaactgcaaagaaactgggtgaaatgtggtctgggcagtcagccaaagataaacaaccatatgagcagaaagcagttaagctacaggagagatatgaaaagggtattgctgcatatcgtgctaagggcaaaagtgaagcaggaaagaagggctcaaagaagaacaaaccagaagatgaggaggaggaggaggagaaagaagatgaagatgaggaggaagagggtgaagatgaagaataaatggctatcctttaatgatgcctgtgcagtgggcttgttttgctaagaatgtgaattctagtacagctcagtattagcttcagtataaaactgtacaaattttcgtatagctcataagattctctgtacagaaaatacttttcttttcttttcttttttttgagacagagtttcgctcttgttgcctaggctggagtgcaatggcgtgatctcggctcaccgcaacctccgcctcccgggtcctggttcaagcagttctcctgcctcagcctcctgagtagctgggattacaggcacatgccaccacgctcagctaatttttgtatttttagtagagatggggtttcaccatgttggccaggctgctttcaaactcctgacctcgtgatccgcctgcttcggcctcccaaaatactgggattacaggtgtgagccaccgcaccctgcctaatgtccctaaatatttaatggtttttaaaaaatttattgtgtatggcagcacagcacacttgtaggaattagtatcaacagtacatcttgcgttttttaagatgctgcattttttaacattttgtaataaaattatgcgtatcaaaaaaacaaagaaattccgtgtgtagttcacactcacagcacatctccgtccaggcacttgagagaatgactaggaggggttcttggaggaggtggtctttgaacggagaatccatcttcaaggattctgtctgtaatggtcaccaagtatttcctgagtcacttccatgtgtcctgcagttctctgaaggggcgtgggacctaccgatgccaattatccagcattatctccagattccaagaagttggggtgtgagccagcaatcagtacagaaaagagataccaaaataagtttgagttggggagtgttccttcaacttcagttttctggaagagatcttttttttttttttgagacagagtttcgctcttattgcccaagctggagtgcagtggcacgatctcggctcaccgcaacctcctcctcccgggttcaagcgattctcctccctcagccttctgagtagctgggattacagacatgcacctgtaatttctactaaaaatacaaaaattagccgggcgtggtggcgcacgcctgtaatctcagctactggggaggctgaggcaggagaatcgcttgaaaccaggaggcggagattgtaccaagatagtttgttccagctaaacaacctggcgctagtgcaggaaaaggtggaaggcacggggctagcacaggagggttcaatattttcaaccttatcaagccatattttggcaactcttgtttttcacgagaagcccccgctgggcttgtcccagcgctgtcctgaggcttcccccatgagttccgatagggcagaggccgccctgagcgtttctctttcccctggtccaagagtggctcaaaagaaggatttttgactggaattggccactttgtgttactttttgacccttgacctcgccccaaagggggatgcgggggaggggctctggtaggggtggccccgctccttccaggtccgcaagcccaggttcccgcccaccgggctcagcccaccctgcggccgttcagggaggccgttggcacccgtgacctacgacccccttcccgagccccaccgaggtcacagccgtggcctcgtctccccatgcctgcttcccgccccctgcccgtgacgggcgtctccgaggaccaatgagcgcgctgtatccacccctcgggcggggccaagcgccgaccaatcgccgctcgggcgcccggccgggtccaaacgctccaatcgtcagcggcggcggggcgggcagagggccggggatggcaggttcaaccaacgggtgggcacgtcgtcctcgcgaggaggcgtgccctgcggccgggcgtgcggtgtccgcggcggcgcagggagggggagggaggtaaacaagatggcggcggcgtgtcgggcgcggaagggggaggcggcccggggcgcccgcgagtgaggcgcggggcggcgaagggagcgcgggtggcggcacttgctgccgcggccttggatgggctgggcccccctcgccgctccgcctcctccacacgcgcggcggccgcggcgagggggacgcgccgcccggggcccggcaccttcgggaaccccccggcccggagcctgcggcctgcgccgcctcggccgccgggagccccgtggagcccccgccgccgcgccgccccgcggaccggacgctgagggcactcggggcggggcgcgcgctcgggcagacgtttgcggggaggggggcgcctgccgggccccggcgaccaccttgggggtcgcgggccggctcggggggcgcccagtgcgggccctcgcgggcgccgggcagcgaccagccctgagcggagctgttggccgcggcgggaggcctcccggacgcccccagccccccgaacgctcgcccgggccggcgggagtcggcgccccccgggaggtccgctcggtcgtccgcggcggagcgtttgctcctgggacaggcggtgggaccggggcgtcgccggagacgcccccagcgaagttgggctctccaggtgtgggggtcccggggggtagcgacgtcgcggacccggcctgtgggatgggcggcccggagaagactgcgctcggccgtgttcatacttgtccgtgggcctgaggtccccggaggatgacctagcactgaaaagccccggccggcctccccagggtccccgaggacgaagttgaccctgaccgggccgtctcccagttctgaggcccgggtcccactggaactcgcgtctgagccgccgtcccggacccccggtgcccgccggtccgcagaccctgcaccgggcttggactcgcagccgggactgacgtgtagaacaatcgtttctgttggaagaagggtttttcccttccttttggggtttttgttgccttttttttttcttttttctttgtaaaattttggagaagggaagtcggaacacaaggaaggaccgctcacccgcggactcagggctggcggcgggactccaggaccctgggtccagcatggaggtggtggacccgcagcagctgggcatgttcacggagggcgagctgatgtcggtgggtatggacacgttcatccaccgcatcgactccaccgaggtcatctaccagccgcgccgcaagcgggccaagctcatcggcaagtacctgatgggggacctgctgggggaaggctcttacggcaaggtgaaggaggtgctggactcggagacgctgtgcaggagggccgtcaagatcctcaagaagaagaagttgcgaaggatccccaacggggaggccaacgtgaagaagtaagtatggcttgctggggtcggggccgggccgggccagtcacggtgctgatggttctgtcttccttccttctctcctccctccctcccttacttcctcttaacaccctgagctggacccgtctggcgcctgtgtcctccgtgccagggagagcgtggttgggggcctgcgttacggactttcactcaggcaaggccagttgtcgcagcggggcgtgcgtttgcatgggctcttggactccagttaaaatgccctggtagcgaaaccctcctgagaagggagcggcccccaatcccctaagactagccccttggctcccccagctgtccaaggagcagaggcgcccagtggaatcagcctgtgtttgtttgggccccgagagtttgtgtgcggccgccaacacgttttctgcgcagtgtgtggccgttaccggggccaggcgaaatgtgatttgtttatcctgtcagaggggaaccctgggctgccaaaaataactgtttgcaccggcttatcagtcagcaggagggaaacgtagcctttcctcatttgccagggatgtgacgctggaagcatccctggcccccggggctggaagccctgcccgagggggactgtgcctccctcccgaattgcatccggaagaccttacttttccaactgacttcttcaggcacggggctgccgctgggcatcccggacgcctctgcatctgtgcgcggagaagctcctacctagggcagcactggccggcctgagcctctcccagctggtgggggtggccgggggtgtccctgccttatcgcagccagacacgctgcacctgccgccgcctggcgggccctgcccaggccctgctcctttcccagccttcttaactttcaaaactttgcctcctgtttccaagaaaggaccttatctgctgggctaggcctcgagggactggcaaggacaccctgcgcagggcaccatgaccttggaaggaggtccggggaggggctgctgcggtgtctgctctcaccttcctcctgctcaggggccctggggctcctgccgtgtctgctctcacctctctcctgctcaggggccctggggctcacgtacatttttttttttttttttttgagacggagtctcgctctgttccccaggctggagtgcagtggcgcgaactgggctcactgcaagctccgcctcccgggttcatgccattctcctgcctcagcctcccgagtagctgggactacaggcacccgccaccacgcccggccaattttttgtatttttcagtagagacggggtttcaccgtgttagccaggatggtctcaatctcctgacctcgtgatccgcccgcctcggcctcccaaagtgctggtactacaggcgtgagtcaacgcgtgcggcctttttttttttttttttttttttttttgagacggagtttcactcttgttgctcaggctggagtgcagtggagtggtcttggctcactgcaatctccgccccctgggttcaagtgattctcgtgcctcagcctcccgagtagctgggattacaggtgcctgccacagtgcccagctaattttttttttttttttttagtagagacggggtttcaccatcttggccaggttggtcttgaacttctgacctcgtgatccacctgcctcagcctcccaaagtgctgggattaaaggcgtgagccaccgcgcccggccagcacgcttcttaatcagcatgcaggctgtgacatgcggaaaccaggggcacaggctctgaagtttgtactctggagctggagcagtcagggttaaatgggagcggctgggaagggtgtgtttccacgaggcctttctgatgtctcagtgcccagtctggacccgggtagaaggtgtggccagtgccttgagtcagtggagcagttgcctgtgcctggtctctgtgagatgggttggtcaggggctaggcagagcctgtgcctggtctctgtgagatgggttggtcaggggctaggcagagcctgtgctgggggtagcaggtgccctctaaaggggcc[139 bp omitted]catggtgaaaccccatctctactaaaaatacaaaagttagccgagtgtggtggcgtgtgcctgtaatcccagctactcgggaggctgaggcagaacattgctggagcctgggaggcggagcttgcggtgacccgagatcgcaccattgcgctccagcctgggcgacacagcgagactctgtctcaaaaataaataaataaataaataaataaataaataaataaataaatctggcttgagttttgacaaatgtatatgcagggtcaatgggaagacagacgctggagggtggaagcctgactgtgagagtgagccccctgctttcctgaacagtcagtggaggaggtcctgggagctcaggtgagcacctgaacggtagggcagagcctgagggtcttggtggagacaggcaagaaggttgcaggaacctagtctggcccagtgcctgggagaacgggagggaacacggaggcagggaggcagaggggttggcaggacctggactggactgtgcgtcgcagctacccacagcttgaccccactgccttgaagtgagtgatgcaccctcactagtgttcagcgtccaatttcatcctggccctgagtgtgtaacggctttgcccttgcggggccccctgggatgaggggtgagccctgtcccttcctggtcactgtctgccatcaggagctgccccgcttacagctgtgattcaggagccactgcatttcctccagccccctgggtgctgccagggggtcctcctattctgggagctggtgtgttctgactggaggctgccatgtgcagagtgctgtcaaggagaaggggtgtccactgcccagccctgaggcccaaggccttggccagccttgctgccagcgctgcagggaaaaagcctcctttgtgtgtgggaagtttaataaactccgctcagattgtgtctcgcagcgagtgtctggaaccttccagacaagcctcaggcgtccggtcctccagttggtgtggaaagcgtgggcgatcaccaaggggggtgggttggggcagatggagccggcgtgagtcccgtctcttcccttccttcccagaaaggcagccctggagtccatgccttgtcccgctctcaccggcaaaaagtataatcttattagaaataggaaagttccaaaaagcatcaatgagttaaaaagagggctgggcatgttcggtcatgcctgtaatcccagcactttgggaggccaaggcgggtggatcacccgaggttgggagttagcctgaccaacatggtgaaaccctgtctctactaaaaatacaaaattagctgagtgtggtggcgcacgcctgtaatcccagctactctggaggctgaggcaggagaatcacttgaacccgggaagcagaggttgcggtgagccaagaccatgccattgcactccagcctgggt[145 bp omitted]ccctctctctactaaaaatagaaaaactagccaggtgtggtggcacatgccaataatcccagctacttcatctgaggtcaggagttcaagaccagcctggccaatatggcgaaactccgtctctactacaaatacaaaaattagccaggcgtggtggcgcgcgcctgtagtccagctactggggaagctgaagcaaggagaatcgcttgaacctgggaggcggaggttgcggtgagccgagatcgcatcattgcattccaggctgggcaagcctaggagagaagagcgaaattgtgtctcaaaaaaacaattaattaaaataaaatcagtgccataggctgtttctggtaggcagtgggttcctagggtggagcagggaagggctggaaagggtcgcctgtgcccagcccgactccccgtgcttctcgggggacagcacggctagctgctgctgcggagcccacagtggggttctgggggggggggtgcaggcagaaggccgccatgcctccctccccctttccaccccagtgagagtgggctcgaaggcagggagtctgcccgccttgtggagcctccgcagaggcacccagggctgccgtgagcgcacagcctggcggtgtcccacggccctgccctttcctgtcacttccacctgttgcaaaacactgtgctttcgtatcttttctttctacctgtttggaaatgtgaaaatcactgctgccgtaggaaacgggcccagatccgggctgtggctctcccatccgcaccgcccccgcggtgtccagccaggaggtgggaggtgggcggcactcagtgtgcctggttgcggcgatgattggcagatgcttggacctatggtaaagaggattttcgcgagctgggagtcagtcctggactttgtaggtctttacatcccaggcggcctttatggggttccagcatctgctgaggcccctgcgccagccatgtgaggcctgggtgtcctcgaggcctctgtttgtgcccctctctgggcagcgggagggagagctctgagacccagagggagctcaggggctgggcagccgcagaacagcgggggtaatgggtccactgggggttctgggctgtgcacacagtgggcttccggtgcccagccagctggggcaggcctggaatgttggttcctctctcaggatctggggcgctgctgtagctgtcggggaatcagtgaggcggctggacggcccgtatatcccacaaacgccaccgtattgctcaaactggactcaattttcttaacacctttttttttttttttttttttttttttggagacagggtctcactgtatcgccgaggctggagtgcagtggcgcaatcatagctctgggctcaggtgaccctcctgcccccaaggtagctgggactgcagatgtgcaccaccacacccgactagttttttgtagagatggggtttcgccatgttgtccaggctggtctcaaactcctagactcaagctatccgcctgcctgggcctcccagagtgctgggattacaggtatgagccactgcttcgccacgttcacctttatttacttatttatttatttttgagacggagtctcgctctgtcccccaggctggagtgctgtggcacgatcttggctcactgcaagctccgcttcagcctc[133 bp omitted]ggcctcccaaagtcctgggattacaggcttgagtcactgtgcccggcccacctttttattttttattttatagagacaagggcttgctgtgttgcccaggctggtcttgaacccctgaccttaagtaatcctctctggcctcccaaagtgctgggattacaggtgtaagccatagtactgggcctaaagttcaccttttttttttttttttttttttttg[132 bp omitted]cacc[137 bp omitted]acccggcaaagttcacctttttaaagtgtgtaattcagtggcatatagtacattgacagagttgcacaactatcacctctatcagcttccagaacattcttgttaccccagaaggaaaccccgtctctgtcagccatcactccccattccctccccagtcccggcacccacgcattcccttcctgcctctggattggcctgtcctgaacatttcacacgagtggtgtcacacaccgcgtggccttttgcgtccggcttgtctcacggagtgtgctgtcctcaaggggcatccgcgccgtggcctgggtccgaacctctctgctgttcacggctgcgtcactttccagtgtgtggagggccacgctgcgtttgactgctcatctgtggctggacacttgggctgctcccgcctctgcctgtgaattgtggctgctttggtgcacgtgtgctcagccggcgtccctctagaatccttgagggccttgtttcagccacatcaggagggattcagggaccagggcacgcgggtctggagctgggtgttcctgggtctccatgtgcctcccagtcctgctctgagccgtgggaggccggggcgagggccaggcccatctcttccctgtatgatctgtttctaggcagacggaggctcctagccccacctctctgtgagcttgagtggcgtttatgactctccttcctatttcctgtcctgctaatcaacaagtcagctaaacagtccatgctgcctgggcaagcccagtaggcccctaacgtggcacctcggagcggctggcgatgccccaagagccgggcttccccctcctggaggctcttcctgttcctcgccaagctcttaggtttcgctgggcctcctcttctgctctttttctggctggagacgtcagaggaagcctggcgatctagagaagctgatgtgcacccatcatcccggaggtgactgccaccaggcgggggtggctccacccccactcctcccctggcataaatcgggggacgcacgtgcctgcgcagaatgccttggtcccttttaattaaacagacaacccagtgtcccttggtctatgctgacctgctcaggagtgcctgggctcttccacgtttcagctgctgtgtgtcctgctgctgtgaagtgtccccgttgaggtggaggcagggcagggcgccttcggtgagggcgagtcctcctgtgcccgtttccccatctgtagaatgatggctcatggaggagacatggtgtcggcaggtggtggccggcgcagggaggtttccaggagggagtcctccaccctcatttgcttttagggccgtgcagcctcccgagcggcccccacgaggctctgaggctgcatgcaggttgagctcctggcctcactgcccctcctcagggttaggactgtgctggagcctgggtgggtgtggggtggtccctgcacaggcagcaggaggtgggccagagcggtgctggacctgaaggcccgtggctccctcagctccactgaggaggctggaatagtgtcctgggccaccttccctgccggtagccggctcctgctgagggagggggtgctttcgcctcctggtggagcatcaggctcttggggcctgtgcgtccgagcatctggcctctgctgtctgaaaacagcaccttccccgccccccggccaccgcatctcctctgaatagaaggcaagtcttgcctcccaggaatggcctgtgaccttcatcagcgggggaggttaggggcacacagagccctggggaacaaggggatctggggctgagccgggcctctcgggcccaccccgagctctcctgagcagcctggcaggcaggaaggcgctgggccccggggcctttgccgagcccagcctcaccctcagcgtccccctcaatgccctgggtgcctgccaggctgtggacacaggccctggccagttctataaataaccttgccgggccctgctgggaattggtgccaccaccacatagcccagagagaacggaaacacagggcttctcagcgagcagaccaggcctgcggtgaccagtggaagtgggggacgctttcagggctgggcagcccgacagggcaccgggcacagccaggggccggaaccagttgctcactggctccgcttctgggggactgtgtccctctgtgccccgtccccatcacaccttgctttcccttcatcctgctctcctagcccctccccagactggcggccccttgtccaggcccagccccagcacagcctgcagccctggcagagctcaggccttggccttctgaggttgccctgagggcagtgagcaatgagccctgggactggtgcactgggagggaaaggtgagccaaggcttcctgcaagaggcagccctgagctgggggtggggaaggctgggtcgtgggatacccctgacaccccaagttttttttttgagatggagtcttgctctgtcacccaggctggagtgcagtggtgagatctcgactctctgcaacctccgcctcccaggttcaagcgattctcctgcctcagcctcctgagtagctgggattacaggcgcccatcaccacgcccggctaatttttgtatttttagtagagacaaggtttcaccatgttggccaggctggtttcgaactcctgacctcaggtgatccacctcggcctcccatagtgtcgggattacaggcgtgagtcaccgcgcctggccccccagctgttttttatgctccatgcttgggcttcctgttaagaattaaaaaagaaaaaaaaaactatggagatggaatttacatactgtacaactcattcgttcacagtgtacaattcagtggcattaagtacattcacacggctgtgcaaccactacttctaattccagaacgttcggtcaccccaaaagcaagccccattcccattgtgtcactctccatcccctccaccagctcctggccactctgaatccacttcctggctctggattggcttgtcctggatattgcatagaaatgggatcctgtcggccgggcgcggtgactcacgagagcaagagatccagaccatcctggccaacatggtgaaaccccatctctactaaaaatacaaaaattagctgggcgtggttgcgggcacctgtagtcccagcgactcaggggctgagtcaggagaaatcgcttgaacccgggaggcagaggttgcagtgagctgagatcatgccattgcactctggcctggcgacagagtgagactccgtctccaaaaaaaaaaaaacaagaaatgggatcctgtcatcccagcgttttccgaggccgaggtgggcagatgacttgagcctagtagttcaaacgagaccagcctgggcagcacggtgaaactgtctctactaaaatacaaaaattagctgggcatggtagcacacgtctgtagtcccagctacttgcggggctgagatgggaggatcgcttgagcctgggaggtgcactccagcctgggcgacagggaaaccctgtctcaaaaaaaaaaaaaaaagtgcatcacacactgtgtgtcctttagtgtctcactgtgacatcctcaaggtgcagctaggctgtggctcgagtcagagcctcactggtttttgtggctgagtcttgttgagtgcgtggatgggctgtgctgatcctcgtctgtggaagggcccctgggtggttccacatctcggctgctgtgcgtcctgctgctgtgagcatctcgtgctccgtttctgcgtggcgtgtactgttcctcagggtgtgtacctgggagtggagctgctggctcacagggtaacagacctttggagaagctgcagacgcttccacgcccacccactgggtgtgaggaccttgctcctcgtcatttttgtttttgtttaattttttcttttatgagacagggtcttattctgttgtccaggctggagtgcagtagcacgatcacaggtaactacaggctcaagtgatcctcccacctgagcctcccgagtagctaggacttgaggcacgtacctccacacctggctaatttttgtatttttagtagagacagggtttcgccgtgttgctcaggctggtctcgaactcctgagctcaggtgatccacccgcctcggcctcctatagtgctgggagaaatgaagtgtctgcgacagggcggcagctgcagagggggctgtgctctctggcctgttgtgccccacccttgtgacaggcaggtgggcgtggccaactgggcggcagctgcagagggggcagtgacaggcgggtgggtgtggcaggaccccacaatgtctctttctgtggcgtctccttcttcgcctgccccttcctatgggccatccttccagctcacctgcggcccaccctccaaggagtgggaccctcggagttgggagcccttggctgcgtgggactgtactgtgtgacggagccatcaccagggctccaactcaccctggctcctgccacagtctgggctccatctgtgctaccattgcagtagtctggtttctaggaagcaaaactgttactgagttacaaagctcaattaagagtgtcctttgggaggccgaggcgggcggatcacaaggtcaggagatcgagaccatcctggccaacatggtgaaaccctgtctgtactaaaatacaaaaaaattagccggctgtggtgacacgtgcctgtagtcccagctactcgggaggctgaggcagggaaatcacttgaacctgggaggcagaggttgcagtgagctgagatcgggccaccgtgctccagcctagggacagagcaagactctgtctcagaaaaaaaaaaaagtgtcctaactgtgtcctccaaagccctcgccggccgatgacagactagagggcgctgtgctcccaccccctaccgccctgagcctggacgcgtggcccctgcagggccctttcccacagcactgtgaactcacagcttctctctagggaagggaggaggtacgccacttccacagggagatggggaggccgactccagggatccaggccatcatcctgacgttgggtcggctgatacacccctgtcctctctgtcccagggaaattcaactactgaggaggttacggcacaaaaatgtcatccagctggtggatgtgttatacaacgaagagaagcagaaaatatatcctttccggtgttgggaccgcggggcctccgtgggaggggctggggccctgggtccgcctgcctcgaggcctgctcctcttcccgtctccttgaaggagactggcacacgagggccgtggccttccctggttccccggaagtcagccattgtggcaatggctgcgcagcttgctgaaaggggccctgagccctggcccctgtgtcttgggcccgtggggtgtcaagtcccttttttctcagagtctcctcccaggctaaccaggggtgtagccacggtctgcctgagacaggccacgcgggctgaccgttgtgggccattttggtcgtggctgggcgtgtcctcgtgtcatctgtggacacccccatgggtcttacgggcacagcctccctacggggactttgcttcctaaggccctgtgcccagagcaagagccagaagtggtcctgaggctggggctgtgttccctgagccacgcggtcaggggccctgggaccgtcctgcatgggcccgagcctgcttgggggggcgtccaggaggcaccatcccccgcccatgggcagggtgggggacgtgagccccgcaggaacgctgccccaagagtcagccctgtcctccccttccccgtaggctccttcctcctgggacgctggggcccctgggccttttcagaggggtggctgagggcagggtgggccctggtcccgaggaggggcaaggtgggtgcagagggtccctccagagccccttttctggcccccgtgctccctgggcctgtgagtggggccgccccctgagctgtgtgtccttagcgccccacgtatatggtgatggagtactgcgtgtgtggcatgcaggaaatgctggacagcgtgccggagaagcgtttcccagtgtgccaggcccacgggtgcgtgcgcggggcaggggccagggtggggcgggggccgggggccaggcagggcaggctcctttccgtgaggccacactgcttgtcctgatattcattgacatgaaggcccaagtttttttgtttttttgtttttttgtgttttttttcgagatggagtctcactctgtcgcccaggctggagtgcaatggtgcgatctcggctcactgcaagctccgcctccgaggttcacgccattcttctgcctc[134 bp omitted]agcctcccaaagtgctgggattacaggcatgagctaccacgcccggccttgtaaaggcccaagtttttaaaaacagttttggggtcccccatgtgtggcatccacaggcagggctgctgccaacctcccgcctccatctttgctgggcctgctgcctgaggccagtggcctgcttccagcccatcgctggcagccgcctgccctgaccagatctcctggatgcaggtctgtggcctcagagtcagggccccttgctgctgcaggaccacaggggcagggaggggcctgctgttccagcaagactttggggtgcagccggcctgtggcccacaggaaaatgagacctgtggacatccggggccctgccagacgtggctcggccggacgagggtggccactgcaggcgcaggtgtggctccctgctggacctagcctttcctctgtcctgtgtgcctggacttctgtgacttcccagctgggcctgtggtgtttgggaggctcccaggcagctgcaaaggggacccctgtgaggggcagggaggcctcggccccaggacgggtgtgtgctgcccgcaggtacttctgtcagctgattgacggcctggagtacctgcatagccagggcattgtgcacaaggacatcaagccggggaacctgctgctcaccaccggtggcaccctcaaaatctccgacctgggcgtggccgaggtaggcacgtgctagggggggccctggggcgccccctcccgggcactccctgagggctgcacggcaccgccacaggcactgcacccgttcgcggcggacgacacctgccggaccagccagggctccccggctttccagccgcccgagattgccaacggcctggacaccttctccggcttcaaggtggacatctggtcggctggggtcaccctgtaagtgccccgcccccccgggcactcaccacacgcacactccgaggggcctctgcgtcttgggcagctgccggcctgtgggcgcagggcgtggccaccggcccagaccctctctggccacagccgctagggggtgcttactttatggaaatgtaactcatacggcagatggtggttcacccgtgtgaagtgcagcctggcccgtcagggatcttcacagagtggcacggccgaccctcctcccagagccccacagggaagctgggcgggtgacagcagctccaggccccttccccgggtgggtccagaggacactcccctcctaccccgtagcctccactagtggaaggtggtgaagacagaggtgtccttgagtccacagggcctctggtccagcagccacgggacgcctctgtccctggggtagagctggggctcctagggcgtcaaccaccttgactgaccacgcctttcttccctcccctcgaaatgaagctacaacatcaccacgggtctgtaccccttcgaaggggacaacatctacaagttgtttgagaacatcgggaaggggagctacgccatcccgggcgactgtggccccccgctctctgacctgctgaaaggtgggagcctcatccctctgcccgcagccccagggaggcggggcttttgtgcagaaatgtagggttgggggtgtcaggtggggggctattggccccgagaccccagcaggcattgagaggactgagtggagaggccgacctccccgcagggcctggtttgccaggtccctcagctccaccctgcttctgggccctgttcaccctccgaactcccaccccagagggcagtgctgccctgcgcctcccccagccccaccctcgggggctccctggcttgcagggtctgtcagggttgtcctgctgcacttcctacgcatggcagcaggtggcactggccgtccgtccatctgcccagtggccttgggagaacggaaccgccctggccgtccagcccagccctgtctccctgccagccgcgcacaggctgtccccggcatgtcccaggagtggagtggcctctgtcagggagaccgcctgtgcgcggggtcccccttaggagcgtccaggtatcacccagggcctgacaacagaggctgggcaggcggggacggttggtggggtctcaggcctgtgcccagctgacaggctcctcgccggcttctcctcagggatgcttgagtacgaaccggccaagaggttctccatccggcagatccggcagcacaggtgagcggcccctgggggcagtggggccgaggctgcagggaggccggccatgtgggcagctggttgagcgggcgctagagcagggcgtggtgggggtgccaggctgggctggggccagaccccgtgcagcgcccgcagttctcggggcccgagtggggtctctgggcagtgtcctgttaccggccagacccaggcgccttgtccgaactggggtctgagtgaggacatgcgtccgtccctgccctaggcatggagatgcgccaggaagggcacagctggtcccaaacactggcgagagcctctctttttcccctcctcctggggctcccagcagcagggtgtggctgggatccagcccagggcccccagctccatgacagggaagacagagcagcggacggggtcagcaggccccacagtgccgcctccctcacttcgtgggctctgctcctctgcaccagcccctggaggcccttgagccgtctgctggagcccctccgagccccgaggccacccactgagaccggctctgggagtgggagtgtccggacccctgaggcgctggtgctgattgtgccttgggggtctctgcacagctcgggtcatctgggcgcctggcggggactggggctgccccccgatagcctcctgggctgggatgtgctcagggccccccagacccccttctggcctttgctggctttgcagccagcatccatctggtgggtgctggcttctgagtgccacctgggacacaggcctcagggtggaggggacatctgtcaggcttggagtcaggtcagcctgcctgctcctagaggacatggctgagcttctgtggtcacagccaccccttgcacggcctggtcccagctcctgagtgtgtggcaggtaccctgggcccagaggagctgggtcggaaaactggaccgccctggtgccagcctgacaggcgccactgcttctgggcgtttgcagctggttccggaagaaacatcctccggctgaagcaccagtgcccatcccaccgagcccagacaccaaggaccggtggcgcagcatgactgtggtgccgtacttggaggacctgcacggcgcggacgaggacgaggacctcttcgacatcgaggatgacatcatctacactcaggacttcacggtgcccggtgagtctggcgggggcccctgcccggctctgctgactcggccaggatgtcccacgggagcagggtgcctgcctgtctgcaacaaggacagcttctgccctctggtggccaatcccacgtccccaaagcctccagcccacctgcaggctgcctccgccctgcgggccgctgggacatggctgaaaggtgtggggtcagcgggggcaccagcccaggcctgtctggccaggagggttcctcaggcgtctctccgggtgctgcccagccaggcaccacccaccggccttggcctgagtcccagcaggagcaggcgggggagccccagggtcgggggagggtaggtgagagtcagggtgcagggtggcccctcagacagctggcatgagagagggtccagtggccctccctcccgtcgtccctgaggcctgcccgctggccctgatgccggccgcccttcttccctaggtggcgaggaggcgtctgaggcagggcttagagcggagcgcggcttgcagaagagcgagggctcagacctttcaggagaggaagcctctcggccggcgccgcagtagtgcctgaggaggagctcagggccttagcgtaggggcggcccacattggcagccagcccctccccgccatgctcccggcttggctgtgttcggcccagggctgggccgtgtcataaagagttttgcagtgtatctgcagggtggatgcttgctgcgctcgggctggagcctgagggggctttctgctttactgtttcagcgggaagtggtgggcaggggccggcctgagaaggggggtacgccaggcaggttgggatgtgaggacccagtgcacagggtccacccccgggcccgagggtcccagaatagtgggggccctgcagagagccccccattaggtccctcagcactcctgggcccctcatcaaacccctaggctcagctcagtagctggtccccaggagagtacagtgtgggggcccccgagagcacagtgtatgggggtccccggggggtacagtgtctgggggccccccaggaggatgcagcatgtgggggccccccaggagggtacagcgtgtgtggggcccccaggatcacagggtctcagctcctgggctcttggatttgcagcaccacgaccatcgcgtctggtctgttggaacgggaggtgctgctgggtaccctggtcactagggtgtgctgggaggtgggggcccctcatggtgcccatccttggggcctggctgcaatttgaccccaggcccagggtcttctgcctttcagagccctggtgccctgagacgggcagccaggcaaatcccaggcaggagggccagttagggcagggccagcccaggcaggttgcgagagtccctactgggacgtggaccacacgctgacccccacggccgcccctgcaggccaggatccctgagccaggacccggcactggcttccctcctggggaccctcaggcctgtgtgagacctgggctgccctggggtgaggtgcctgggaggagagcaggggctgggccacctttttcatgaccctgctaagcccactgtgggtggtgaggaggagtacccagcagggggaagggccgccagaccactcggcatggctgaggcctcagtactcagtactgggtactcaggtggacgcccctcccactgctcagatgctggggacaggctcaacttcaggcttcagcgtgagccccgtccctgacctgcagagcccccttgcgttggggcaggacagcccggcgccctcgggtcaggccatcctctgcgctctgccggggctgctgcatcggcctctgcgtgcctccactttggcctcacgtgtccctacccaggatgcgggtcctgctgccaacacccagatcccagggaaggggcttgggctagatcctgggcaccagtgcagacaggagtgtggggtggggcaagggcccagtggcggctgtgcccgctgatgcagagctggggcaccttgtccacagggtctgccccaccagagacgggctgggcccaagctcagacctatgggtgcaattggtgcctcctcaccaaggtcttttttatctttttttttttttggagacagagtcttgctctgtcgcccaggctggagtgctgtggtgcgatctcggctcactgcaacctccacctcccggattcaagcaattctgcctcagcctcctgagtagctgggattacaagtgcgcgccagcatgcccggctaatttttgtatgtttagtagagacgggggtttcaccatgttggtcaggctggtctcaaactcctaacctcatgatctgcccacctcggcctcccaaagtgctgggattacaagcgtgagccaccgcgaccggcccaaggtgcttttttaaagctagtgacttcctgtgcacatggggtgggtgtgtggcaagttctggaagctgctgagtcagccactggtccattctcggagctggggctctgcactgggcacatgagctctggggcagcccggggcggcctcccactgacttcgcccgggaggggcctcggggatggctcggcagccagtgtgttcgcggagtcctcgccaaccaccacggctcctcgcagggacagtacgtgggcagcttcctgcactttcccctgccattgtgagaacagtgtccacctgggcagggtgggcagccccaggcctgtgggtttcaccagggtgctggtgatggttggtggctagcagggactgggggcagctgggggccctggcaggctgagctctgctccccgcgtggttctgtgctggcatttcgcgtgcctggcctgagcctggcccgagcctggccctcctgtgtcctcacagatgagcatgtggcggctcctgggcctctagaaccaaccatgggccagggtgccccaggggagcacgggagggtcctgccttgtcagcttgcctcctactcgtgaggttcctgcagtcagtacctgggtggggtcccacctgcggccatggcaggtgcaacagacgtggtggaggggacactcctgcccaggccatctgcgggaggctcagccccggggggtgcctcccagagctgctggggggcagcatttcaggctggatacacctgggcctgacccgggggcgggcatggcctgggcagcagctgtaagtgcgtccccgtggtgggggccagccaggtccctgtggctctggggttgcgcccctcagctcaggccacacttgccgtctccctcccaggacaggtcccagaagaggaggccagtcacaatggacagcgccggggcctccccaaggccgtgtgtatgaacggcacagaggcggcgcagctgagcaccaaatccagggcggagggccgggcccccaaccctgcccgcaaggcctgctccgccagcagcaagatccgccggctgtcggcctgcaagcagcagtgaggctggccgcctgcaggtggggcgcggcggggcccgggtggggcatgtggggacaacgcctggatgccacagccagccgtgagcatagcccgcgctagtcagtcatggtgaccgtcacgtggctgcgcgtggttgccatgtggcctttgggtggcttggccacgtagcgatccccgtggagggtgccgtctcggggcctggtgtctggccagcgtgctggtcatggaggcctacgtgtggcggggctctgggggggcgtgccgtcctcacagccacctctcagagtgggtgcattccgaggaccctgccctgggcctggcgccccctccccatgcccgcgccgcttccaggaaaggcttatgctgggctcagcccagaggcttttgagcaccagtgggtggtgggtggtggggaggggccgcggcctccatggctctgccggggtgccgcaggctctgagccagctgccaagtatggctgaggctgagtcgtgccggacgctgccctgtctctccctgtgtgcctgcctcctctcccagccccagccccagccccgggtgggagacggagtcccagaggtgtcagagacccttaagtcacctgccgaggatgcggggtggatgggggcccgaggctgaagcccctgccttgccacagcccctctcccaggttttgggggccaccgcctgagttacatgtctgtcccccaaatgggtgcccacagcccatccaccagcgtcagagcccgccaggccccactgcaaaaggccacacaatgtaccccgggagtgactcaagggtggccttccctggcctcccctgctgccccccaggagtccggtagccccatgactgtacctcagcttctccatcctcccaggggcccgcgggaggcggagaaccggtgcccaggctgacctcttccgtcttccttccaccctgcagcccgtgtccaggagccccgccaggtgcccgcgccaggccctcagtcttcctgccggttccgcccgccctcccggagaggtggccgccatgcttctgtgccgaccacgccccaggacctccggagcgccctgcagggccgggcagggggacagcagggaccgggcgcagccctcccccctcggccgcccggcagtgcacgcggcttgttgacttcgcagccccgggcggagccttcccgggcgggcgtgggaggagggaggcggcctccatgcactttatgtggagactactggccccgcccgtggcctcgtgctccgcagggcgcccagcgccgtccggcggccccgccgcagaccagctggcgggtgtggagaccaggctcctgaccccgccatgcatgcagcgccacctggaagccgcgcggccgctttggttttttgtttggttggttccattttctttttttctttttttttttaagaaaaaataaaaggtggatttgagctgtggctgtgaggggtgtttgggagctgctgggtggcaggggggctgtggggtcgggctcacgtcgcggccgcctttgcgctctcgggtcaccctgctttggcggcccggccggagggcaggaccctcacctctcccccaaggccactgcgctcttgggaccccagagaaaacccggagcaagcaggagtgtgcggtcaatatttatatcatccagaaaagaaaaacacgagaaacgccatcgcgggatggtgcagacgcggcggggactcggagggtgccgtgcgggcgaggccgcccaaatttggcaataaataaagcttgggaagcttggacctggccgtctgggttttgttcgcgtctcaacgtggatggggcggcagcggggcgggcgccgttgacatgcggagggcagtggggactcggggcgcgggagggccggggccggctccctcagggccggcggcagcagcggtggcggcgcggttattgctcggaggcggcgcgggctgccgccagcacacgccgcagtgaggtaaacggtctcggaggtcggcagtcacggtgttgagccgcctcccggcccagggcggcgaactcgtctgcgaccgttagcgccccgcggcccccgcccgggcgagctcgcgcacgcgcccggcacgcggcggctccatcgggcccagtgggctgcgcgaccctcgggtggcgggccctgcgactaagcggccgccccgtccgggactgagggcgagtgatcgttgtcctcaggagcccgaagctgagagccgttcacgccccttccttcccgcccagccggggtctccgcggcccgcgcctcacgacgcccagcacccggcaagcaccggaaagagcagtgcacacttcggcggcgcgagggcggccggggctctgcgcctgcgccctgaagcggcgagcgcgcctccgtcgcccggcgcgtgcgcgaagggcccgcggtccccgcgcattcgcgtcggggcgtcgcgcccccacgtctctcccgccgccgaggccccgtgcggcgccggagaagctgccagagagatgggcccaggacgcgggacttaggccgggctgtggtcgggggacgtgggggcggcggcgaccaacgcgggagtcgccacgacgggctcggcgaggcgcggcggaaagagtctctcgtcgaggccagccgccagcttgtccagcaccgacccggatggtaggacgcacaggcccgagccggggcaccccccgccgcccggctcctcctcgatgacggggatggcggggtcgtcgccggcgccgcccagggtgcgaccgtcgggcgggccgtccacgctgtcgccgcgccgcaagggcgcacgcgcgggtcgggccgcgccggcaggcggtgccggggttccggccagggccggggccgcgcgggcgccggggtcgctgtgctgccggccacgctgccactgtttgcgggcgtgcgggtgcgcgcgggcgcggtgtcgcgcggcagccggcgtgtcgtcgaagtgcgggtcgtggcgcaggaactcgtggaacagcgcgtccgtcttctcgtcgatgctgtagtcgcggcgcgggcggcggggccaggcgcgcgggctgcggggccgggcgggcgcggcaggtggctcggtgtcgtcgcctgcgccgcggccctcgatgctggcgtagccactgtccatctgcagcagccggcgcgcctcgccgtccttgggccgcggcgcgggcggggagggcggcgggaaggcgggcgccgcgcccccggagcctgagcccgagctgtcgccgctgcgcaccgagtcgcggtcgttgccgctgctgctgtggtccgaggcggccgcatgcagctcaagcgaggcgcgcaggctccacaggtcgcggtagctggtctgggcctgctcggggcccgcgtcccgctcggcgtccggctccagtggcggctgctgctgctcaggccccgcgctgcccgcgccgcgctccgggggggaatcggggctcgctcctcccgctgcctcggccgcctctagcctgcaagccaggccgcgccgtcagagccccgccgagccccgcgccccctacccggccggccatcccgcctctggatcagggagggtggacgcgggtgggacttgggactcgggcgggccttggaaggtgagagctttaaaatgagccagtgtgttttgcaggggatgcgtcttgcattgaccctgagctgtggcgcctgcttattaagcagggtgcctccatgctggactgcagacggcggggccccctcccttggaagcccccaggaaaagtcaacatgcttctctccgggagtcacgttttcccagcctcccagtggacgtgggagccgcaggggatggactggacgcggttgagtccagctcagcccctgctccaggctagggctctctgcccacccatgctggataaccagcaggaggacagtgcacagacgtgagggtcacccgccataccagggctgccccaggaaccctgctctgccccagccccacgccccattcccatcccaccgacgtgggccctgggcttcagggaagttgcccttgggttgggggaggggtgctgctggccggagtggtcacagcagcttctgagaggagtctgcccagccttgggagcatgggcggggcgggggtgggagagggcctgggaccacagcagaacccttcaggcctcggactccaccagcaagcagcagtaccagcgccatcctcggggggcccctcctccccacccaccgccctacccttacccagtctctccctgcttccctcctctggtccatgctggagaggtggccccagtgagtccgcctctgggaggggccttgccgctggaggcaggcgagcgcgtgtccacggggcctggagagcgctccctgggccgcctaggggggggcgaaggggggcaagggcccacaggtccacccctagcacctccatctactgaaaaatacctgccgagagcagggggcgggctggccagaaaggggcgggggtgcgggaaggccacggcgtcgcccgcccgggcaatgtactggatgaagtcctcctggggggcatccccctcctcctgctccgtgctctcactggctgcccgctgccgctggaagtggtgccgcttgggggaacctgcgcacgggatgtgccgtaagcgtcagccggcatgtgcctccacccgctccacacacacacagaatgcctatgcccccccgccacacacacacaatgcctgtgcccccccgccacacacaacgcctgtggacccccaccacacacacacaacgtgtgccccccacacatacaacgcctgggccccccccacacacagaacgcctgtggcccccatacacacacatagaacgcctgtgccccccaccacagaacgcctgtggccccctcacacacacacgcctgtgccccccccacagaacgcctgtgcaccccccatgcctgtgccccccccacagaatgcctgtaccctcctacacacagaacacctgtggcccccacacacacacaacgcgtgtgccctgtctctgtctcacacacacaggagtgggccctggcttgggccagaccctggctggcatctccccgggtcaggtgggtgcggacagtggctgtgtgtacaccctggagtacaggtgagaaaactgaggcacggagggaagaggtgctgggaccagagagcctgagcagggcagggccaggaagcgagtgagtggaagggcctctggcaccgatagtgccttgtggcagccctggtcaacatgtggccactcataagggcgtgtcctggacacctggtggcctgcacagcctggctgaaactacggaaggcatgagagagtcacatacaggctggtgggggccaacgaggagagggagagaggtgccctctcctgccagctccaccctggtctggagagcgctgggggactgccccacccctgcctcggcccccttctcccaacagcctccccagcaaagcttgagtgggcaggccccagcaaacaggttctgggatgtgctgcaaccacattggactctaaatgtctctagtcacccctgggccccattcatttcaagatctggattctctcagctggagcggggcagccagaggaggccttcccctccctggcccctagctaccttgggggtgggggctgggagaactcaccccacccccgctggctggagccacaacacagggtctcccactgtctgatgatgtgtcctctgtcatgctgacagcaccttctctctgcacttgtcccctatcctggcctcacctgacgacaggacctgccaccctgtccacaaggcagagcgggccccagcccctctgggctgccctggccctgctgagctggctgagcagggctggtgcctgctgccagtgctacagatgggacacctctgctccccacacaaactcctgcctcgagcccagataaggcagccctgtctccaggatcctgcctgacccaaggcctgcagaattgaagggctactgtcaaacagtccagggatctatgtgctacagcccagagggcaaaagcaccccctgccccggagcttcggtaagttttactggcacacagccacgtgcattcgtcatgcagcgcctctgactgcttcctcgcctcaacagcagcagagttgtggagacacagcctctctgaccataaccccacgaacaccaccatccggggcctgatgggaaaagtctgctgacccctggcccagtccaacacttacttcgtgttagaggaagtcagagcccagacaggcagagggcctcggccaaggtcacacagcagctgatggtctgccagcgggcgagggaggggccccgggggaacccgccttccactcacattcccagggatgagagccgagcatggctgggaggggatgcaggccacaggccccaccctctgcgctccacagtgaccaggtggcccccgacaccctcctttaccacctcatcctggatgccccaatggcccgagagcagtcggggcgcgcaaagccttcccgcacaggttcccggagctgggtgggtctggctcaggccgcccgcacactcagccctcccagccacctgcagaacctcaggcagcacgcccgctggcagactgggcaggactcagccccagagcaccggctccccacccagcccacaacctcctgctcctggatgtccagggcagcccctggcagccagcacccagcccacaggggcccactctccaccaggtgctacagctcacctctcgtgtccagactggctgcccgctggctgggctccagcttccacttcttgaccttgaaataggggctggccccatccaggctggcatggcggcgcaggcgggtgaggaactgcagaacggtacctgccccggatcccgggcccgcctccccaggccctgctgcagccccgggccctccagccttggtgctcctggtaccggcatccaactggcagggaacagagatggcgctcaggctaagacttcttcctgggcccgtgtgctggccccaggtggccgtaggtctgagagacagtcccaagggccccccatcactgggacagagaggggtacctgctcggagaggggcagaagcgggaggaggggcgctcagtggctgggtgggctacactaaggtgctctgccctctggggaaggtccctggatatggggtttggagagaaaaggaggtgcgtgtctagaaggtctctcgcccacggcgtgggctgcaggtgagggagggcaggggtggcgcaccctctccagaacctagggaatgtcaaatgaggtgggagcctggggtgccccctgcatgtgtgaggacacgcctgtgtccggtgtgcggccggctccctctttctcccgtgtgcaatgacccggcgggccaaggagggctgcggtggctggcaggtcataggttgaccttggtcctggactggggacagggaggggaaggagcctccccggctgtggacaccatgggggacacgcaggggccctcaccgaggtgccttccccagagtcgctagatgccgaggggctgatctctgcgaagtcagtggcgcccgcggctgagttgtaggggtcacctggcagggcggagctggggcccacagagcggccggtgagggccttccccgggggctgtgggacagagccaggtgggggaggaagcagtgacaggtcaaagagcatgggtgggtgagggacatgggcaggtgaggagcatgctgggcttggccccctgccctgctccaccccaccccgcccatcccgagatgagggccacccagaaaaagagtgggtgagggcgtgggggtccgggagtccccggggctgcctcccgtcccccgaggaaccggggctgctgcccataggctcacctggaagatggccagagtggccttgggagaggtggccgggtggggcgtggtggctgagctggcctcgcctgagtcacactcgtggatggtgacaatcttgaggggcggcaggtgcaggtgcgtgagccgggcattcttcaggtggtggaagtccccctccgtcagtgtgtacctgcgacagcatctggccatcagagcccgcccacctcccatgcccgatgccccagctgccgtgctctgccatccaccctgccggcctgggcaggggcaggcgaaaggggggcaactggccaaggccgccccaccccacggtcccagtccaggagcctctgccttggtccctgcagcctccgcacccagctcctcccccgtcccggcggccaggacctcagacaggccctggggtgcctcccaacgccgccccgcttaccggcgacccttgtcctgcgtcttgcggctctgctcaaacagcgccgcctcattgaaggagacccggcggcccgtggagctggtggacaggaagcgttcggtctccgcatcctggcactcggggtcctctccccggaagtcggggtctgcgtggagaggcaggagagggtgggccccgggcgggccacgccaggcgcctggtcccgggagggctgctcctccgggcggccacggcagggagggctggggccgcggcacgggcggccgggctggcggggcgagggacactcgtccatccgctcacacactcactcgctcagcacgcgcctgggcccacctacgcctgggcgttaaggaaacagagatgagtcggaatcgagctgcgcccagtctggtgggggagacagacagacacagacggtcaggcagcccgagggggcggcgggtggccgaggggcggatggacaggcgagcgcacagccaggctggccagcacctcaccttgggctgggtgggtgccgttgtccaggtaggtggtggtggtcttctccgcttcctccatggccctgggagagacgttgggagagcccagtggcacggagggcccagatagccacagtgggtctcggctctttgccccaagccaagccctgcgcatcacccagtctccagaggcatagcccaccctgtgactcagaagccagtgaggtagaccccccaccacccgatggcacccacaaccaccatgcacctgcccagccgaggtgggggcctcgcacctgttgaggcgctggtggacgtcccagcagcgcttgcagaggagcaggacgccagacaacaccaccagcgtgccccccacgaacagcgacatcaccaccaccagcagcacgtagttgtccaggatggggtctggctctgcctgcgggtgtgcagggggggtcaggtgctgctggcctggacgacctcctgcccctcccacctgtcccctgcacccaccgtggggcgtccagtggcattgtcccacgacgtcgtcagggctactgtggcagtggtggtggtggtggtggtggcggctgtggccatggtggctgtgggctgcattctgaactggggaggagggccctgtggggaggaagcctggtcagctccagctagacctacttctcctgcaggagccactgcagacaagctgggtcttccctgcaggagcaggagcccacacagggggcagtgactcatggagaggtagcagagccggaggcagcctccacccggcttggctctgcccagcgggccccgggggctctctctggacctccatctcccatccccatggcgggggaggaggcctggccctctgagggtgcgcctgtacccatcacaactgcacacagccggtgcggcctgtcctgcaaggtagcgccaggccctggagctcagcgctgggcagggcaagcactcggaggaatggggacgccaaggcggtgcagccggctcgagaaggactccagacgccctgtccgccccatcacgggggtggggggctacccccaccccaagaagttcagctacaccctggcagggcccacccggccatggttgggtagagggagacctcccgctgcctgcgcgccagggagggtgcaggggctgggcgcgtgctcccgggtcacgactccgggaggtggaggtctccccggtgctgagtgctggtgggagtgcaagggacaaagaaggcgcatctgttcccagccccggagaagctggttcccatggcgactgcggagcaggccgcggctgggggggcgggttgccagggagcggcggggagggggcgcgggggcggcggcctgggggggggcggcggcctcgggggggcgggcgcgaagccgcaagatggccgcggccgcctccccgccgtgcccagcccgggcgcccggagcatccccggccgccttacgctcgggggaaactgaggcggggcgcggcaccagggaaaggagccgcctggacgctgtgcggcgcagccgggtggggaggcccgggaatcgcagggggtcggggctggcgccggggtgctcggcggccccaggtcagcaccgcacgcgcgagacctttcccggagcgagaggagcgcacaggcggcagccgctcctgcccttcccggacttccgcccacacgcgacagcgggaaactgaggcccaaagccgggcagggtcccggcgggggctggtgtcctcagcgctcccggtcacaggctgcccgggccctggtactgggggaaggggccgcatatgtaggtcgggaaatgagttcaggctggagggggtggggacaggcgcaggatggtgaccggaggccggggaagatggcaggaggccgaggggaagaggggggctcctgggggaggcggctgcgggagccgagggcggaggttccccacggggcagcaccgcgcccccgagccggccaagggtggggatggcgagccaggggaggcagggacccgacgccagggctgagccgagacgccatcgtcctcgcccgacctcacagggagaaactgaggctggggcggggcctgagcgggggtccctctggaggcagccgggtggggggcgcaaggcccggatctcggtccccacgcccgccggactcctccgcgccctccctccggccgcttagcccacagccggctgcgatccccggcctgtcccccgtccgccccccgcagccccgagcccgccgcgcctacctcagcgccgggacgagcggcccatgggcggcgggctggcggcgggcggctgcgtggcgctcgcggctggctccggcgcccggtggccgcggagcaggcggagaatttatgaatggagagcgcggcgcgggggaggccggcgcgagaggaggggccgcgcacgtgaccgcgttggcggcgcgcccgctccgcgcgcccggtgctgcccggtccccggcccgccgcccccgctgcgctcgccgctgggtctggctggctccgcgccggccaccgcctccccttcccttccggcggggcggggggcggagcctgcgctcccgggcgcccactccgcacgcggagccgccccccgcacccgccgcggcggccgagccccgcccccggcccatcggcacgattcacctcgcccggtcctgaggtcccagggacgcagctgggggtgtcctggaattcacgactctgcagcccgaggtgcgccgcgtgcgcaggagggggtggggtccgggggggcacggactcccctctcacgttgcttggtccgtgggggttctggggcggcacagccagggcccctcggccacaattcccctttaagctgcacagcccagggtctctggacacaggcgccccgcctgcttccccacgcaggtcccctctggcactgtggaggactcgccatgcctctcctgccccctcccctgtgtgacagcgatcacagaccccggcacaaagctgagcagagcccatcggggcccaaacgtgcactcacagaggcctgctcctcgtggggtgacatcagaacgacacccgcagaaacccaaagcccaaagctgcccccgcttctccctcttagaccatcgaacctcatcctgcagatactcaggccacacacctgccaccagcctggcccgagcgccaccccaacccctctgagcccacgcctaacaccccacagcgcctcctctttctcgtcccaaagaaaggctgacaccgctctggcacgtggctggcccagctcagcctccccgcctctgcccttgcaggtgccctgtacccaggcctctgtccatgcagccagagattcaccccggtttccttcaactccttccccagcttcacagtctcggcgcttctgctcttggcttccagcccatgcctgggtcccctcctctgctacgtccctccaaggccctatgccttgcgccttgcctgttcctgtgtgctgtggggccaccactccgatagctgtgaactccaagggcagccccagggaacctggtgccaggcaaatgggaattgcatgggcaaaggttttgaggcaaaaaagtttgcaagtcaatgcctgtgaaggaagcagagaaatcgtcttgttcccagcaggaccatgacatgggcaggcttcagggttttttgtatttcggttttgctttttggagagacagagtctcgcactgtcgcccaggctggagtgcagtggtgtgatcacggctcactgcaacctccacctcccggattcaagcaattttccagcctcagcccggaaggtagttgggactacaggtgcgcgccatcatgcccagctaatttttgttttgtttttttttgtagagatggaatcttgctatgttgtccgggctggtctcgaacttctgggctcaagagatccttctgtctcagtctcctaaattgttgggactacaggtgtgagcccccacaccccgccaggtttctgatttttaataaagactccctctggctgtgtgaagaaaaggtacctgtactaaacggggggaggctggggcctcctaggcaagagatggtagccgcggtggccatgctgggtgcacaggccgggacagggcggaattccagaggaaccccaggtttggggctggagtaatggcgccctcacccgtgggcgaccctggagtggggactggagggaagtggttccacgagtgagactgagtctattaggcctcccagtttcctggagtggcagctggatatgcggtcctgagagccaggaggtgcacaggtcacgactcgaaaagtgaacaggcctcctcctctgcaccccccgagccagggccaggatgaccaggctccaagtgaccgtcacagcgctggcccggtgggaggagccaggcccacgccttcatcctgagtcggaccagcagggccttcttcaggtgcttgggttccaggggacagtggcgcccgccattgcactggcctgaacacgggcagggggcgagggtgcagcctccggatgtagggagccacggatcgtgtcggattcgcccacagcaggaggcattggatctccctggctgcacccttgtaaagccacagccccagggcctcccctgctccctgcacccctggggtccagcccaccgcgccaggctcaaggccctttccagggagcccgagccccaacccccgccatccccgattccgcattttcccggagcctaaggagcggggctgggggcccggccgggtgccgcagacctgcgtgagcgcgggggcggggcggtgacgtcatagccgcgagcgaggctgcgcgggccgctggctgacggcagcggagccccgagccgcccgcgcacgcgctcctgcgtcagaggcgcacgggggcgacggccaggcaggaggtggggggtcggcgagcgcatctccgggcgcggagcgccctctgccggcgtcgaggagcagcgcgccggggtccgggatccccagcgagccctcccgcgtcgcccgcgctgtgcccctcgccgcggtcgccgtttcctagaacagctgcacctgcagccttccaccctgtcccgtcctgcacactttctcggcttttactgtgatttatttttggcttttgccaccacctaccactacgacctg[132 bp omitted]tcctgcctcagcctcccgagtagctgggattacaggcgcccaccaccatgctcggctaatttttgtatatttagtagagacgaggtttcgccatgttgaccaggctggtttcaaactcctgacctcaggtgatccgcctgcctcgccctccagatcggataaagtgctggaattacaggcgtgagccaccgcgcccggcctgacctgcttattaatgatctcaaatgtctgctaaataacccccggccccagagtgggattctcactctgttgcccaggctaggcagtggcgcaatgatagctcactgcagcctcaatctccttaggcccaagcgatgctcccgcctcagcctccccagtagctgggaccacaggcgtgcatcaccacgcccggctaattttgattatttgtagagacggggtctccctctgttgcccagactggtctccatctcctggggtcaagtgattctcctgccttggcctctcaaggtgctgggattacaggttggagccaccacacctggcccagagccggaaacttgatgttttcttgatgtctatccagggccctgcatccaatgagcgccccaaaaatctttttttttttttttgtacagacgggtcgggggtgggggcgatctacactattgcccaggctggtttccagctcctggcctcaagtgatcctctggcctcagcctcctaaagcgctggtattacagtcgtgagccaccacgcagccgaatcttgaatttcactgaagttcgttttactccacctcccaggacggtttcaccgcccttatctgaccaccccctggttctgccgcagcccgggccggaacaaaactgcaacccccagaatacctcacgacggggcactgcgtcgtcaacgtcgcgtgcgccctgccgggagtcgtagttcgcgcttgcgctctcgccgggactcctcctcccagacgtccctgcgcgtcgtcctcctcgccctccaggccgcccgcgccgcgccggagtccgctgtccgccagctacccgcttcctgccgcccgccgctgccatgctgcccgccgcgctgctccgccgcccgggacttggccgcctcgtccgccacgcccgtgcctatgccgaggccgccgccgccccggctgccgcctctggccccaaccagatgtccttcaccttcgcctctcccacgcaggttcgggcgctgcgggtcgggaccctccgtggccgccgcccccggagtccagggtccccacccccagggcgcgacccccgcttccgggcccccggacccgcgcgccccggaagccgaggctactcagccctggaccctcggccctgcctctgctgcccgagccctgcgctgccctcgtcccgggcacctccccgagataagcgtctcctgggtgccctccccgatctccctggccaaagcctgggtgtcgccggatcgttgcattcccatttcgcggatcagtagaatgaggcgcaactgttgaggaccaaagctgcaacttcggatccctgcgctgggttgtctcagtgcctcacatcagcgccaggtcctgccctgacccattacttagcaggacaggccgagtgcccggtgggcgcggggccggcctgccccgccatcattccccacgctgttgtctgcaggtgttcttcaacggtgccaacgtccggcaggtggacgtgcccacgctgaccggagccttcggcatcctggcggcccacgtgcccacgctgcaggtcctgcggccggggctggtcgtggtgcatgcagaggacggcaccacctccaaatactttggtgagtccggtggagggctgcagggccaggccaggctggggctccacatcccaggtcagtctccgtct[133 bp omitted]tgt[213 bp omitted]gaggagattgtgccactgcactccagcctgggcaacaagagtgaaactccatctcaaataagaaaaatacagttttagcaggtttgtccactgaggagcctgggctggccggtgatgaaagcgaaccagaggggaccctgctctcagccggtttatgactggctctggaccaaccaatgtaggatggtcgaagcaagagatgtaaaaccacccaggcccagtggttcatgcctgtaatctcagcactttgggagactgaagtgggagaatcgcttaagcccaggagtttgagactagccttggcaacatagtgagaccctgtctctacaaaaaataaaaagaaactgaccaggcgaggctgggtgcggtggctcacacctgtaatcctagcactttggaaggccggggtgggagggtctcttgagcccaggagtttgagaccagcctgggcaacatagtgaaatcccatactacaaaaaattagctggttgtagtggtgcacacctgtagtcccagctactcgggaggctgaagcaagaggaccgcttcagccggggaagtcaaggctgcagtgagccaagatcatgccactgcacttcagcctgagcaacaagagtgagaccctgtgccaaaaaaacccctcaaaaaaccatgttgggagggctgatcagattaggggaggaaggtcatttgtgcaggaaaaaaagcagttctaagcctcactggtttccagtggtggccagatttgaactcagcttgcctttggccctgaccccagctcaacccatgggtggtgggtcagagggagggcctctgtccccaggcagtgcttttgggggttcctccagcttctagtcctttcttgcggcccctgttttgttcttctctagcagttgcccgccatgttgggcccagggccagtcctgtgggtctgtttgcacactcaggacacagacttggatgtttgtggagctcctggttcacagggggctctggacttgaccaggggagtccctgaggctgtgcagccctttggggtctcacgccttccccccgccccattcccccagtgagcagcggttccatcgcagtgaacgccgactcttcggtgcagttgttggccgaagaggccgtgacgctggacatgttggacctgggggtgagtgtcagaggggacctgaggctcagcaggttggagctgtccaggctgcgggggagggagcgctgggggaccaggagccgggctggggtcgctgctggcccctcaccgcccctcaaccccttgcaggcagccaaggcaaacttggagaaggcccaggcggagctggtggggacagctgacgaggccacgcgggcagagatccagatccgaatcgaggccaacgaggccctggtgaaggccctggagtaggcggtgcgtacccggtgtcccgaggcccggccaggggctgggcagggatgccaggtgggcccagccagctcctggggtcccggccacctggggaagccgcgcctgccaaggaggccaccagagggcagtgcaggcttctgcctgggccccaggccctgcctgtgttgaaagctctggggactgggccagggaagctcctcctcagctttgagctgtggctgccacccatggggctctccttccgcctctcaagatccccccagcctgacgggccgcttaccatcccctctgccctgcagagccagccgccaaggttgacctcagcttcggagccacctctggatgaactgcccccagcccccgccccattaaagacccggaagcctgactgtgtgctcggctcttgttcctccacctggcccggtgaagccgggagcgtcctgggcccctgctcacgtcctccatgtcccttgcaaatagggcctttgagctcccctggactatgtcccttagggcacctggaggtccgtaggaagcaggctcgagggggtgggtggggtgcagccaggcgggcaggctgctgaccttcaccctacaacggtggggagggtgaaggtcaccagtgatggggacatcggtcagggaggggtgtccctgctgctcctggcgcctctgccgagttcctggtctccaggccttgaccctgagccctgctggcccttggccctgcccaccagcctctggaaagaggcgggccccacccgctcccacgctggccccgccctgtgccagccggtcctgtgggtggccctgcctggccgggtgccgaatctgcagtgtttttggcacctccgtgggcacctaggcttctgggttggccccagatggagtggggtgggcccaggagggggcggctccctggcactgccccgttgggcctgcctcttctcctttccataaccctgggggcgggcaacactggctccagctggtgtgtggacggcgggggctggggtctcctgacctcctcccttccttgggacagggccctgtgcagtggggtaggcagggaattccaggggggtgagtggggagggtgggcctgcctgtgtcactggagctgggatggtgacagagaggccgccccgggcctgtcagcacggacgggcagctcactcccacgtcatggcactatgcgggtgacttgccacagcttcacttgaggcgaggtgccgttgggggccttgcgactctgaggccgccggtcagcagatcaggtattctggaacagcccacggtcccctgcctggctccccctccacttgggcctcgggacacgagtgaccaggcccccacttctccaggaatccgcagcccagggaaggttgtgtcagccaccaggccacaggagcagcctctgcccaggccccccctcccccccgcccccagttccagccccaggtcttcaagttcctgccaggccaccaggaccctataaataagaccaagggcacagctgggacttagcaggggcccagcgggaggagctgctcactccggggacctcccctgcccccaccaccagggagggtgtgaaccttggagccaggcctcaggacacccgagacacctgacactcggagggaacagcccgtgctggctggatgcgtcctggagcaggaggcagtcagggtggggccgggaaccaggcggtcaaggcccttcagtgagggcagcccctggcttagtgaggcagaacagagcacagggtttgtccccatcacacccaggaacaacccactcaaccatggggacgccgagtatgggaaatggtggggaagcgttttagcatgtttattcatttagactggctctgggcatctggtccccaaagggccacacagtggcccctgtgaagcccagcaagttccgacaacccgtgtcccattccactcccgaccagactgaggtgatggtgtccattccactcccgaccagactgaggtgacggtgtccattccactcccgaccagactgaggtgacggtgtccattccactcccgaccagactgaggtgacggtgtgcaggtggcagagccacacacgagaggcaagaggcagggagggaggtgggggctgctggccactcacagggggccccagtgtcctgcttgggctgctcatttggcaccagtccacggctccctccgccacctttgttctcactggaagcagaatgagcctggccctgtagttcccacctggggccccagcccttcatccaagccccattcatcgaccctgcccctcctccctccaactgggtccagttcactaagctcccagaactgctcaagccattcccacttcctggaccatcgtcttttttttttttttttttttttttttttgagaggagtttcgctcttattgcccaggctggagtgcaatggcacaatctcagctcaccacaatctccgtctcccgggttcgagcaatgctcccgcctcagcctcccaagtagctgagattacaggcgcacatcaccacgcctggctaatttttgtgtttttagtacagacagggtttcaccatgttgatcaggctggtctcgaactcctgacctcgtgatccgcccgcctcggcctcccaaagtgccaggattacaggcatgagccaccgcgcccggccttttttttttttttttttttttttgagacggaatctcgttttgtcgctcaggctggagtgccctggcacgatctgggtttattgtaacctccgcctcccgcgttcaagcgattctcctgcctcagcctcctgagtagctgggactacagacacatgccaccatgcccagctaatttttgtatttttagtagagacagg[148 bp omitted]accgcagcccctgtgacccccttccaagggttatcccagcctctccctctctggcctagccctgacccttcggggctgggtgtgcctgtcaaggtgggggccacggctgccgggagcatgggtggcagccggaaggagacctggggaggagcgcagccctgggaggggcgcccatggccagggtgggggtggaggtggtcaggccagataaagggaggggccagatgagtggacaggaggtgctcccgtaggaatggggtccccttctctaaatagaggggcaggacggggcccacctcaaccaggaccatcctcaaaaagccgacggggaagggtgagatgcacaccacattcgtgtctcattggctgtggcctcagtttcttcatctgtaaaatggggtaatgcccaccccaaaggctgggaaccagtgcatgtcctgcattaatggggggtgatggccccaaagtgatcctgccgcatcccctcaccacactcccacccaccctggagaaactgaggcttggagaggccagttacctcccggggtcacagcatagccggctggtgactggctgggcacaaggcaggcctggcactggctaatcgctccataaatgccctctgaggtcaccattgacagatgcaggaggccagggctggccagggcacccccactctacggcaggtgactccagcctgttttcctggacgacagccgctgactcaggcccctcttcccgtcccccccacgcgggcgcccccaggcggaagcaccgggcctggggcgacaggaagggggcggggcagcgagtcgcgctgtacaccccaaaaccctgtcccgctgacgattcggggtgcatctcagcccgcggcgaggcgggccgagacccttggctcggggcattcaaggggagtccccccatgaactgcgccaagcctgggtcccgggtggcccagccgtcaaggcgccccagggccagggccggcaggcaggggcgggggccagtctgcgtcaccgcccgcccggccccccgcccccctgcccgccctaactccaccccgagggaaggcggcgcggataaaggctgagggccgcgcgcttggcccagaccggcccggccagcgcgcattcggccccggacgaaggtactcgcagcacttggagcgcagaaccggccgcgcccggtgagtgtggaggggggggacctgcgggccgaggaagggtgcccactctagatggctcaggatgcccgcacttttctttgttcttgggacaggagggatcggggagcctccggtcctgggaagccccccggggtgcggggtgggaggggctccgcgcagccagcgccgccctggccggacctcagcccccgccccgccccccggggcactcccccttcaccgcgggtgaccttgaactggttgccgttccgccctccgttgcccagccacacggtcccagtctcccgactacagtctttcgttcccgatcggggttcctcccccgcgcgcagcccagtcgtcttcctcccctgccaggggcagcgcggcgccccctccccgggactccgggcggcgctcccaggcgggcccggcagagggcgcgcccgagctgctgactcaccgcatccccgagcgcgcgcgggcgcagccggggacgccgcgtcacgtcacggctcgagcgggcgcgcctcggggaaacgggttctgcccgcggccggcgggtgggcgcgcggggcccccggcggcagccacccggccacgtcaccgaggtgcgggcgccccgccccggccacaactccgcccccacgcaccacgccctccccggggccgcggccctagcctcaccgtcgcccgcccgccccgggaccccggccacgaggcgcggacttcgcgctcccgcttccgctcgcggcttttcccggacgaaggcggcggggtggccccacgacttcctgcccctcccggcgccgggaacaatggcccgcgccccctcccgctcccggccgctcccttgggatcgcgaggggtaccagacccgtctccagacctgggtcccgcgccccccggggcgcgcccgccctttgttgcgggctccgggcgcttatgaatggctgcgggcgcgggcggggcgggggcgggcgcggagaggcgccagccccgcccccgctgcgctccccttggtcgcctgggcgctgggggcggggcgagggggcgggcccggctgccacgtggggcggtgccgcggcggctctcataggcccgggctcgcggccgactgggcgctcggcgcgcggcgattggccggcgcccggccggcggagtaagtagtgaatgggagggggcggcggccccgccccctggaacgttgatacattataacttttttttcttgttactttcacccccagatcctccgagcggcggcgacggctgttgctaagggaggggacgcgcgaggaagcgcgacccgggcggcagacggcacccagcgccaccagccgagcggcgccccctccccaggacccttaaccgcgccgcgtcccggtcgcgcccgccgccctttgaaggagaagcaagtgccgtccccacccccggaaggcgcccccaggagccggagcgacctcggagcgccactcggattttggatttcggtctcgcattccgcggccgggactttctcgaggaggacgcgcgctgctccgcgcccccgagtgcccggaggacccggcatccggggagcctctcgcccctgtcccggaggcgcggcgaggattggcggcgcccgccgcccccagccccccagcgcgcgccggggatggagccgcagcccggcggcgcccggagctgccggcgcggggcccccggcggcgcctgcgagctgggcccggcggccgaggcggcgcccatgagcctcgccatccacagcaccacgggcacccgctacgacctggccgtgccgcccgacgagacggtggaggggctgcgcaagcggttgtcccagcgcctcaaagtgcccaaggagcgcctggctcttctccacaaagacacgtaggtaccgcgcgcccccggccggccgccccctcgggccccggcccccgggcgggaacaaagagcgcgccgcgcggggaaggcagggggcggccagacagggggcgggggcgcgccgcgcgctctcgggcgccctctgctcggcctcgcctgcctcggccccctcccccgcccggggtcgccgcacaaaggcggctgcgagggcgtcccgggccgggcttcggcggccccccttgggggcgggcaggaatcccagggcgttgcgggggtcccggctgcgggtgtgggggccgccaccgccccctcccgcctgcgtccgcgccggcttccgcatctgctcggcggcctcctctgcgtctggctgtctccccccacttgcgtctctctccccccctttgttctcgcctccgagcgctccccgcagcctcccctcccccctggtatttaaatcgcctgcaggcccggagccctccccccgcgggcctccggggacacgcagtgtccatcccagtggaggggcccatcgggggaggggcggagggggagggtctcctttgtctgcgcggcggcggccgcctgcgccggggagggaggaggagggggagcccggcccggcgcaacccccagggcctctcctcgggccgaaacccgtggttcctacaaagaggagccaggactagaattagggaattgggggcaggggctgccctggggtcgtgggggaaggtggcatagagcacactggggcccagaggaggagaaagtgcctggttggggtgcagagggggtgccagagtccagggcgggggttccactggagggaaggggtccgaatcgccaggatggggctcccagcaccagacggagacctctctgcacgcgcttagggccctggatctggaagccgggaaggggtgggggtgggaacttatccgtctctccccacacaagcacagccctcccccgcggcctctgcttccgcgtccctgtgtcgtctccgcggagtctcatgctcttccttcctccccccagccggctcagttcggggaagctgcaggagttcggcgtgggtgatggcagcaagctgaccttggtacccaccgtggaagcgggcctcatggtaaatggccatggggctgcgtgcccccagaggcccccgcacacaggcagtagcccctccctcggtacctgtccgcacacacactacctggggcccccaccccgccagccagcagggccctctccaccccctattccagcccaggattccgaccccacactcaggcccctctcctccctctctttgtagtctcaggcctcaaggccggaacagtccgtgatgcaagctctcgagagtctcacggagacgcaggtaagacctcgccagccccttcctaacagggcagccctgggagcagggtgccttggccaccgacggggcctgggggttgtctgtgctcccaggaggctgggggaggggaggggacgcgccaccccgcctgggtgccagcctggcctggcctccccacctcctctcccccaagattcaccacctgacccggagggctttctctcccacggtggctgccctgggggaagggggcctggctttcacaagactgcctgcaggatgaccttggcctatggggcctcatccccgctcacaccctggcctgcatccccagccccctccgcccccaccgaggagcccccctccagccgctgtggcttccccagagcgagtttctccttttttacatttctgctgagggctgggggtggcggcttgggtgacactccttccgccttccgtgacccccatcgtgagagggtggggatctcgtcaccctcccctcctctctctggcctttgttctctaccccgaaaggggagggggcgggggtgcccagccctggggccagtgaggcctagacaggatgttaggaaaatatttagtaagcggccaggagggaggctggggctggccctcacccggttcccggttttgctgcggacttttttttttttttctccttctttcctcattttcttggctgcggccaagccttcctcagacaagggccctggccacctcccaggagggtgacacaggcctcagcaatccgcccgctgccagggtgggggacgcaggctgccacccgccccagcaaggggtggccggcttcccgggcctccctggccccgaggcccgcacccccttccgctttcccagcggcatgtagagtcctgccctttccctacatcgcgggggcagggcgggggccgggagctgggtggtctgccatgggggtggccacagcagcagcagcagtggcgtgggggcagagccggggtcccgagccagggcgggggctgcaggtgatttcctggggcgagtgtgagcagagctccccgccgctggggggctgcggttggcagggggcccagggcgtgttggcttcacaccctcctccctgggcgcctgcgtcaggaaggagctgggttggggggggctggagggggtgctgggcggagacactgggctccccagggttgcttccctgcctggcaccgagtcatgcccgcccattagccttccccagggaggaagttgcagggcgggtggtggtggggactccagctgctctcgggaagccaccccgggcccttcctgcaaaggctgtcttggggcaggggggtagggggccgggcaggctgggccgcagggtgggggcttcaccctgccctcctccctgcctccctccccatgggccccaagcagagaaggttacgccagctactgccagtggagaggagagccgggagggagagctgggaggcggtcggttctgagtcatcccagcctatgtcacttctcagaaacctccgccacccccccccccatcccggccactggggagagcagggctctggcccatacccagagcagggggcttggcgaggacagggtgagattcaacccacacccaccctgaacgggggcagattgagggtttctgtgcttggagcaggttgtgccctccgggactccagccccagggcggtcagggccccttcctgcagccttgccacagccccctaggcctccgccccgcccaggacagataaatatttatcttgagaaagcaaaggttaggacagaagaattcgtgcaggaattccacccacttgctggccctggtgacttagctgggagggggcctgaggtggagcccctcccgtatccacaggcagagaggatctaggggcccatgagggtgggggaaaggcaaagtgaaggttgtttgaggtcagtgactgccagctgggccccgccccctctggcctcagtttccccttgcaagaccgacctagttggccagggaggggcaggcccccgtctgacccgcctctgtccccacagcccccagcggcgcccgggccgggccgggctggcggaggaggcttccggaaatacagattcattttatttaagcgtccgtggcaccgacagggaccccagagcccagagaggggcggcgagaggccccaggtcacagcgcggggggactgggccgggctgggctgggggcgccgcaagctggggctcccagctgacggaccgctctccttgcaggtcagtgacttcctgtcgggccgttcgccactgacactggccttgcgtgtgggcgaccacatgatgttcgtgcagctgcagctcgcggcccagcacgctccactgcaacaccgccatgtgctggccgctgcggccgccgccgctgctgcgcggggggaccccagcatagcctcccccgtgtcctcgccctgccggccggtgtccagtgccgcccgagtccccccggtgcccaccagcccgtcccctgcatctccctcgcccatcacagccggctccttccggtcccacgcagcctccaccacctgcccggaggtgagcctggggaagggaagggtgacccttggttggaatccaaagggtgggccgtcctggggaggtcttggggaggacaaggactcttagtcccaggtgagtcccttgtattaagggctatcctgtgacctcgggctggtgggtgatcccccagcctagattggtggggtatttctagatcctgagttgacggtcatcgcctgacatgacctggaccagtagatgatctcttgatctttgactcatgggtcatctctgtgtcctgggttggttgtgacctcgtgaccttgggctagtttatctctaaaccctgtgttgacaggtcatctcctgacctgggctggtgggtgatctctggtccctgggttgctggtgatcccctgatcctggaccccgtgctcatgtgccccttcctcccatcagcagatggactgctcccccacggccagcagcagtgccagtcctggtgccagcaccacgtctaccccaggggccagccctgccccccgctcccgaaaacccggcgccgtcatcgagagctttgtgaatcacgccccgggggtcttctcagggaccttctctggtaggtgtcacagcacatgtgtgagctcacgtgtgtcccgtgaccctgtgcatttggggtctacatccacccacaggcgactccacatattctgggcatacacaggctgtgtccgtctgctcacttcacatgtcccccaggaatcccccacacacacgcctggccctgcccggggggccgcgggtcaccaggcgcctgcatactggggacgtgtcccgctcccgccccgtggtccctcgtgcacatcagcccacatgtccacgccattgcctgagctcatgagctcacacccgtggacgcccgtcctggacatgcgggactgtgcccgtgccgggcactcacggccacctctgcccgcaggcacgctacaccccaactgccaagacagcagcgggcggccgcggcgtgacatcggcaccatcctgcagatcctgaacgacctcctgagcgccacccggcactaccagggcatgcccccttcgctggcccagctccgctgccacgcccagtgctccccggcctcaccggcccccgacctggcccccagaactacctcctgcgagaagctcacggctgccccctcagcctccctgctgcagggccagagccagatccgcatgtgcaagcccccgggtgagtggccaccctcgggggtcctaccttccccgcccgcctgggcttctcaaggcccctctgtgtgagctggtgggctcaggagcagctgacctgcccaggggctgggggggatggcagctgccgtggccactgctctgctccagcccggagagaaggcagcatgtgtgtcagggcacaaagtgtccttgtgtgctcccggggggccacaggcccacttcctcctgccccacccccacccggggcatcatctccagatggcatttggtgcctctgtgaatggccaagtcaggcctggcaggccgaggcggggccagagcccacccctaagcatttcagtgacttggaaaagcagcgaacacaacccccctgccagcctggccccagctactcccaaacggcgggttactccctccagagtctcaccagaagatggctactgtactgcccttgggctctgcaccc[142 bp omitted]tgaaactccgtttccactaaaaatacaaaaaattagccaggcgtggtggtgggcgcctgtagtcccagctactcgggagg[144 bp omitted]cctcggatcacagaagcggccaagccccctccatgtaggactccaggaagaatgaggcaggacagtcctgacctccccagctcatggctgagctggagaattagaagccagctgcgtagctgggactccaggcaaacaccaccatgcccagctaattttgtaatttttgtagaggaggggtctcgctctgtggctcaggcctgtctcgaactcctgaggttgcccaggcctgtctcgaactcctgagctcaagcgattctcctgcctcggcctcccaaagtgctgagattacaggcgtgaaccactgtgcccggcatggtggatgtccttgactgtttcctttgctgacctccctccagggagggcaggactgtgtctgacctcaggggcatttgctggggtctggggtggtcctctgtgttcagcaggtggaggctttgggagtcacaggccactacctcctttgcaggggaccggcttcggcagacagaaaaccgcgccacgcgctgcaaggtggaacggctgcagctgcttctgcagcagaaacggctccgtagaaaggcccggcgggacgcgcggggtccgtaccactggtcacccagccgcaaggccggccgcagcgacagcagtagcagcgggggcggcggcagccccagcgaggcctccggcttgggcctcgacttcgaggactccgtgtggaagccagaagtcaaccctgacatcaagtcagagttcgtggtggcttaggatcttcggatcggccaccctcgcccctcgcaccccagcccagggcggcggggactccgagagccccggagagaacgtggcccagccctggagggcaggcggccactcccccagccagaagtctttttttcttttcttcttttttattatttttttctttttttaaaaagttctgaccgtggtttcctggactcttcatgggctttgcttcctacctccttcacccttcactcctgccctcctcttcctcctcctcctcctcctccgtctgtctcctttcacctctgcgccaggtcggtcctccctgccaaccttccccagctccaatatgtagcagtctctctggatggcggagagtgaaggagacggagaaacgcgccccatcccttccgccgcctcctttcccccccgaccctattcaggttttaagtcaaaaatgtcgatatgtcattatgcactttacagatgaggggaggggccgcagtgcgcagaacccaccccaccccccagtgcagacttcggggtctccaccccaggccagcagcgcccactgggctacagcaagccaacaggtcacagaagccaacgaggggactgtttctcttccactcctatcctcttttcttgatcttttttttgcattttccttcatttctttaacaaggagagcaaagctgttttagcagaggctggggctgaggtccccatggggtttgggtgcaggggcatggcaccctttcctgtcgggaagggagaggggaactacccccccagcctgccctccgccccgccccagccggcggactgtgctgtttcctccgcccccactcccgtgttttctgacctcctgcctgagtttggggtatttatagactattaattttctgactgagccaatagtggttggggaactcttgaaaaaggggagagaatggctgggtgctggggagttcccccctccgagccctccttcccggcccaacctgagggatgtggatttgggactgtctgggggcccctcctgcagcgaggatgggagggggtgctgagctgtgaatcccctgggcagggggcgacaactccgtgtagcattaacccccgtggcggggtccgctgctggtctaatttggaccccctgcctctcagtgcccctgccctaggggtgtctgtctccagaggggagggacaaatcccctactggggccatttcaatggggtagtttttggatttttttccccactcactttttattttttaatgataatggagatgtctggacccttcctcaccccacctgtcggtcttgtcctggctctgcctgtcccccaccgttgttctcgtaggtgaaccccaggtcctcaactccccccctttatgtgttgaaagttaatggtttcagatgtgaacatcacgtgttataactgtagcgctgtaaatttttttgtgggagggtgggcagggaggggtcccagagggtagagctcaaggattttgggttttgttttgttttcatttttccaaaaaaaaaagaaaaaaaaatagaaaaaaaaggagtaaaaggggcgggtttgttttttgaagaactgtcttggatacctatttaaatgtgtgttctgttttgttttttaacgatttttaaataacgtctgtgcctccactggttgagggtggaacctccaggcaggaaccggctcgccaccctctgcccggtaagggctgcccaagaaagcattacccgccctcggggggtcgggctgtgggggtcccggcacctggcgtgagtttcatgtatgaaaacataaaattgaaaaaaaaaaaaaaacctacacgagcaccgtgatttcaagtaataaacagaaaatgaaacacacattgactcccgcctgctcgcctagtggggggatctggccttggttgggagggttcctggggtgggatgtcagctcagggagtcagagggactgacctgggtcccaaggccccgaagagggggtggggcaggggtcagggccctgagaatttcccacgctccttccccggctgccgggtgggcaggaagcagccagggtgggagggaggagcccagccacttcctggtacccaaggccggaagtcccttagggtgtggggcgagggcctgcctgcctgcttcgtggcctgggcaggaccctggccccctcaggacctgccagtatgggggagacgcgaccaccagctctccccagccacaggagtcggggactcccactctgccacacccacctgctccccttcctggagtctcacatctgtgtggcttgctgcagggagatcaccaggccgactgggaggacctaggactccgcagggtaccttgggctggcaggtgatacaggcctggcttgacccagccctggggggcctctctggccacacctcctgacattccagcccttcccagacctggccttcagctccaaacctcccggcctttgccccctgtctaggaacacccctggtccggctgtcccttgctgtctgggaacttccccagcctgcgccttccacccctgtccaccccgtcccgcagaccccacccttccctctctctgtccctagcctggagctccccgtgagcctcaccaggactgagtcctctctggggtcccacctccacccatgtccgggctgggcagagatgaggcaataacactatttcatgtctttttttaaattttgtaacctgtatttcctcaggtaacaagagttgcctatgagaagtaattgggctcccattttatagatgggagaacagaggcccaaagaggaacatcacttggcccagaggatttggggtgtttgttcaatgatgtgacctccaccccttatcccatctctaggggccccagtaccgggagcccccaggggaaggggcacaggttcagagagtggcctgggagcaccttcctgagacccctctgcccctcccaacgcccagtcaaccccaaatcatcgcacgcccacggcaggaaggcggatgcccagtcaggcggcacccaccccccgccccgtccctggtgcggatgtcccctcggggctcagggtgggggtgcgggtcaccgacgccaggcctggggtcaaggcgagggccccagggcgccaccgccccctcgctgggcggggtgggaaggaggaaggaggatgttgtctgaagcacctgctgaatcacaggggctgtgtctgtagcctgcagggtggggggcgcgtcccctgcactccaggacccgcccctcgggatgccgacccccaccccagactggggatcccaggggtcaaggctgtgccctgggggcgtggggtggggtatggagctccaggctcagagccctggcctggtagggtcagcccaaccaggggtgcagcgggcggaggggcggcaggcggaggccaagtgtgcgtagggaagcacggagaggtaaactgaggcacaaagagggcagggaccgctgggatctcgcggggcggggtcggccctggatcgctcccttcccccaaccattgaggaaaaagctgaatgggagggggcggcccccggaaacccgccgggatggaaacgcggtttccagggcaacgcgccgcgaaaggagcctgacgtcaccccgggtagggcgccctgcccgcccccgtccgcgcgtcgcgcggcccaggccccgcccaccagcggggaagcctcattggtgatcgcaccgctcgctcatcggcgtgccccagtagcagcgcgacgaagcctccagaaggcgggacttcagcccggcagcgccgagtgcgcaggcgcaagcgcggaggcgctgcagccccgcctctctccccgcgcgtctgcaaagttgggggcgggaggcgcagccgagggtctgacggctgcggcggggcctggacggaagagggggcgagccccggggcgccgcacgtggacccccggcacgggcacgctcacgtgcacccgtcctttcacgccaacgcgtttcctgctgcccccacccctgcaccactgcacgtcccagaccccggcccagcctccccgcggtccctaggctgggggagctcagacaggaggctaggaggagggggactttggggctgaggctttgccaaaggagcaggagtttgccaagtgttgtaggaagcgggaagggtgcgccaggtagggggcacggcgtgtgccaaggcccggaaacgtgaaaccgagtgcttttcgggggcaaccgggaagtcagttggtggagaaaaatcaaagatgggaggaaaggcgaggctgacaaggaccctaaacggtgattccccaagtcggccactggagggatgacttgggggaccagagaggaagagcaggtgagggggagcggcggccaggacatctgggaggtggctagacccgtggcctggactttggggggcggtcgagttggatcgatgatcgatggggaccctggcggcctcaccctgggggaggtagagacgaaaaaggaactacggtgtgcccggaaggtggtggctttaggtccacagggaggtggttggcaaggcgggggtaacagggggaaggagaaaatctgaaatgccggtgtgagctccgggccaagagagttgaggactcaggaggcaggaatcccccgtggccgcccgctgcttggctgtgggctccaacttggtgtgtgctcagagaaggcagtggttggagtgaacagggcctgtgccaggtggggagactagccaaggtgtttgtgcagcctggcctctggagcggcctgggaagagctggagttcgcagggtgggagctgccctgtggctgggagcccgtgctggcgtccctgccaggcggtgatctcacaggtgagcggtgcttggggagacgcggagctgtgggcgggcaggagaaggtcagtggaggtcatggcttttggcttgaggccggagtcctctgggggtggccgaatgcgcccttggagctgccttgggaggtggctagggtggacagcagtggaagccaggcccttggcttagagccactgggttggagggattgagccagtgcccgggcacagccgcccccacagggccttgccccacccgccctcctctcccagcaccatgggaatgggagttaccgggctggaggctggggacgccaccaccccgtggccaagggcgttggggcccaacccaggagcctggtgcagccccacccacgggccgcccagccctggaagggcagagaactggctgcctctggggtcacttgggacaggtgagcagcccagcccagcccagcgggtgggggaggggaggctgtcacctgggccctgcctccaccctctttctggttctcactccctccatttctctttcttttgcctttctctatttctgtcccgatctctggcgctctccccaacccagtaccaccatctccgcccctccgtccctcccctgcttccgccccctctctgggggcccccttcaccccggggcacattccagcttcctcccccgccttgcagtccctccctggagccagctgcctcctcggttgccagagcagagagagtgggcttgggccgaggtcggaggtcgaggagcgggcgggagcctgggagggcacccccaacccctctggaatgtgggtggagcggggcaagggagacagctggtttccacggagggcacatgccccatacccaggacgctacccacactcagccctgggggagagcaagcaaaaccaatgggtgccatcccacgaggggcctgcacagccatcccacacccccgaccagcacgcccgggacagccctccacaggccacgcatttatgggtgcggctggtgtgccaggctcccagatacacaacccccccccccagacacaccccatatacctgtccccaacctcaatccactgtgtgaccctaaaacaaacagaacctccttgctcagcctgggccaaggcctccccaaacaaaactccagcctgcagagtcccaccacacaccgcagctgtcaccagatacaaagagggccctgaccagatacagagagggcagcagccttcccccacaaccaacacacgcctgggcgggggcaggaacacccccagggcctccagccacagacactcacccactcacccctctgtgcaccagtgatcctccgctgcccagccaagcttgactccagcctgctggagtctgggtgggggatggagaggggttcccaggcgagccccaacctatgccttccaaaagtctttctgtgcatgttggaaatacaaatgaaacaggagagttagcatacgggacaattattatttttgtttgtttttgttttgagacggagtctcgctctgtcgccctggctggagtgcattggcgcgatctcggctcaccgcaacctctgcctcccgggttcaagtgattctcctgcctcagcctctggagtagctgggattacaggcgcccgccaccacgcccggctaatttttgtatttttttagtagagacgggctttccccatgttggccaggcaggtctcgaactcctgatctcaagtgatctgcctgtctcggcctcctaaagtgctgggattacaggcgtgagctacagcatccagcccaattttatttatttttagtagagaagggatttcaccatgttggtcaggctggtctcaaactcctgccctcaaatgatccacccgcattggcctcccaaattgctgggattacaggtgtgagccaccacacctggccccagttattagtattttcgagacggggtctcactctctttccaggctggaacgcagtggctccatcacagctcactgcagcctcgctggaactcctgggctcaagcgatcctcctgcctcagcctcctgagtagctgggactacaggtgagcaccaccatgcccagctaattttgctttttttttttttttgtagagacagggtctagctatgttgccccggctggtatcaaactcctggactcaaacgaaagtgctgggattccaggcatgagccagcgctcccggcctgcatacgggatgattccatgtggactgccacatcaaggaagcaaacaacaaggaaagcctggcgctgcgtggagctgtcttttgctgctaactgcccttgaccgacttcctaccaggtcttccctgtgcgcctctaaccccaggaggtgctgctggcatgcccacctctcagatgaagcagtgcggtccagagagcgtcttgggcaccgcctgcctcacagctgggcccctgaccctccagggactgtggctgagcagccatggctgcctggacgggtgtcccctggcccgtctgtccgtctggatgtgggaaccctccaggcacgctggggcgggcaggtgccaggtgcctctccagcaagatgcaacataggtgtcttcacttgcactccgtaggtcctgagcccctgcagctgcctgggagagtggggaaatactctccacttgtcccactccactgttgccatggagatacctcccaccctaggcagggccaccctgagcctggttggctttgcaggaaatccccactctttgacctctctgttaggcacaggacgtgtagtcccatgagagggaactgggcccaggtggagatccatccgcctaccccagagcgcgcatctgttgctaagcaacatctgaggctgcatggaggtgggggctccggagcccccagaccttttcccagtttcagaaactaggtggctgcatccccagcgtccacgcaggcgagcctaagcctcggtcagctttagggtgtccgtgggccatgcagggtcttgggcctttcacagacacctgatctgcacgtcacagacacgcatgggtgcacgtcactacacgtccgccacatgtgcttggctggtctgcgccccagcagaaggggtcacctatgtctctgcagtatcctgtgtactgaaagagcaaacaggtgtgtgaccccagggcaggtcggggtccgtcctgtccccagcctgtctactgcgtgtgcctgtggcaggcagggtctccggatgccgagtgcatggtgtatgactttgtgtccagtgggtacgaagcaggggtgtgggtgtgcacctgtgtgtggcctgtggcggggtgtgtgtgccggggatgtccctctgtggcccaggcctggcctttgggctgctgggatggcctggccggggcaggagtagacagggcctcccagcctccacattcctgagctgtgactcaggcctgtggggagggggtgagtcacagggaagggaagccgacccaccctgcgaacgcatccgaggaacaggagggaaactgaggctggggagcagctcagtccggctttcctgtgtagcagcccctgaatctcaggcccgggggtggggcggggtggcgggggggggcgcgcggggcctcccaggggacctgagatcccagccctggactcagctgggagctgggggaagaggcaggtttaacccttcctcttctgggcttctggaactctgggctgccctgggaggcgcggctcccgctgacacagcacgcgtgcccaccccagggacatgagtcacagcaccaggcatggacacatatgctctgtgggtcccggcacacccgagtcacgcacacccagccctgtccccggctgcccccacatccacatccggataagcgcacactttggagtccaagcgcccacctccttgggttgcacacacagcgccacgcagacgggttcctgtgtctttgcacacacgcgggtgccgggggctctgtgcacacacctccaagactgcgtgcacgcccctatatgccctgcgcaccgacgcaggccggcctggggtccctgcactcaccacgccgtgtgcactcgcacatagctacacattcgtgtccacacaagcttgtgtctctgtactctgcccacgggcacacatgtgcgccacacctggcaacccgcacgcccggtctctgcatcccccaccctggctctgggccccgcgtagtggggccagctgggtcggctgcagcctctgccaggacggtcctatttctgcgcccccgcggggcggccgccaggtgcacggtcccggcccccgcctggctaggaggaggcggtaattatgcggccccggggtcccccccacgcgcctttcatcctcggccacgcccgtcgcaggcctagacgctctctaccgcctcccgcccggtcattagtcggggtcgggggaggacctggcgtccggcgggcggggccccgtggggagggcggagtgggcggtgcgggagcgagggagctccgccctcgtctccatggcgacgccccgcaggggaggaggcccgggaggagtatcagggtgcaggaggtgcgcgccccttccgagacggcaggctggaaagggggcggatttgtgaatgggcccacggggcccaagacagacgcgcggggagcaggttcggggactctgactgatccccgcgcctcgccgggcaggggcgagccccgcgcgtcgggcccggaatagcagtctcgcccccgcccggcgcggctattttgagctcctccgttggggccgaggcgcgggggcggcgggaggctgggggtcgacacgcaggctgcgtcctcgccccgcgagattggacccctcgaggactgtgcgctgtggccgcgcagggctgggcggcggggccccctctcccacgcgaggcgtctgcgtggagcggcggcaccgggagcccggccgctcgagccaaacgccgcggacggagcgaggccgcagcgccccctggtgtccgcaacgggcagcgcgtcccggtcgggtcccgcatggtcagtggccagcaggggtggatgaaggggtcccagccgcctgagacccccggtggggacacaggatcgcggtgagatacctgggagtcacgggtgctcgcagacgcagctgaccccagaggcacaggtaccgacacaggtccacacctggaagccggtgcacagtgctcggcacagatgcaaagcggcaggtgtgcgcaggtgcgtgtcaacgccaccctgggaacccaggatggctgcggacactcacggagcccgcacccaggaacccgctcgtagtaagcgcttaataactaggcactggctgaatgaatgaatgaatgaatgaacacggcgcttcgcaaaaccaggaaaaggcagaggctcacagaaccagggaacgatgggctggggggagcggcaagaattacgcaattatgcaggggccgctgtgactaccaggcaccccctccaactccccccctacaagggctgctctgggtcagagaacgtccaccgcgctgactgctggggctgggggctgggggcgcagatcagaaagaatgggcctgaattgctcccaggctgggcatgtggcgcccgcgtctggggctccagtgggtgggtggcccctcccgcatggacggcgggcgcaggggagctcggtgctgatgtctctctcctttaataaccaccctgcgtgagtggctgacgcagcagccggctgccgctgacggggagtggggcggctgtagtgggggggcccgaggtgcagagggggtggtgatgaatcacacagctgctgcctgggggagggggtcttgagcccatgaggggtcccagagaccttgtcactggagacagcgcccctggctacccccacctcgatccacttgagggtggaagtgagtctgaggtcaggagtggggccgggatttccctgggatgagcagcaaagcgggggtctctgtacgccaacttcccccagcttgtcagcagagggtcatccctccgaagactttctggggcagagaggcaggggtccgcgctggcttcttccaccagggctgggggaggcggcggcatgagatgactcctgggcgaggagcaagtggtggccatagagggccccccagaggctttggggccgccgaagagtagtgagtgagggtccttgtaaagctggttctccagatggcggcggctttaagactcccctccgccaaccaggctcagtaggggaggcctgtggaaggagagaaaaggcctgggtggaggagcagagtgggcctggccccgcgtggggagcgagtgcgccgttgctgtgcagcacggtgggaggggaggccgagggccgggcggagtgctggggtgcagtggggactcggggtgtccgcctgcacccgacagcagggacgcacaacactatccggccaggcgagtgtgggggtgtgggccacgcacccagccgtgataatcgcggttccagtgggagttaggcttgggtgcgggttggagtttgtaggcaaactgggttgcgtaaagttggggtgcaccaaagtgtggcgatgtaggaagaattgggattgcgaatattggggttcgcatgaatggggttgtctctgttggggttttggtgggcatggggttgatggcaggaatggagtgctggggtgctgggaaaactgggacgtcggttgtattggcaagaatatcacgacaggtgtcggggttcagatgaagttgggatgtctgacagccgggtcttggttgggtaggggatctgggctaggttgttatgtcgggactgctggagcacaggcaaagtcggggtcccagtgacacccagaagtccccatgaggcctgaggcctgggaatcggggctagaggcccatttgttccccgccgcaggccagggagcaggcacgcgtaactgggtcagccccgccccgccccgccgcgcgctggtcacgccccctcgagcgcgggtggaggactgcggactgcaaacgtctcggccaatagtcgagcccgacaccagtccgcgggagggggcggaaccgagatagactcggcccccagctcatgaatataagacgcaggcgcgccctctgattggcccaggatgtgtagggggcggggcccggcggaagcgtatataaggccgggctcggggacgcccccccctcactcgcgcgttaggaggctcgggtcgttgtggtgcgctgtcttcccgcttgcgtcagggacctgcccgactcagtggtgagggccctggctgcaccggctccgaggagctcggggcggcgggcggcctgcggcggccaggcgaggcggggccgcagcggcacgcccctgggagggggcgggcccggggtggagtccgccccgccggcggcgagggacagcgggagattgggccgagtagcggccagagggcctctccccgccggtccgggccgccggcgacccggttgccgccgcaaaatggcggccgcgagctcgaggctgtgcccagcgaaatggcgggagcgccgagttcccggatggagtggcgcagggtgcgcgcggggcgcatgcgcacgcggcgggggcggggccacgtggcgcccccggtctccagggccgctttcccggccttggggctggaggtatccacacaccaacgcttttgcttaccgagccttagtttcctccttttcccattgcgattgcatgagggaaaggacggcctcgtaaatcttgggtaggcgtggcccgttctagtgtggttcctcgtctgccacgtcgtgctttgcgcccaaagtttggtccaagttggcacagctcccagtgccagacttccaagtctagttctcagagccactgggtggcggccattcccagccagtgaatgctttgtctgtgtcagcactgaccgcccccttaaatagccagttctcctaaatgccacttcccctgcctggaaatcctgccttatcacttccggggccatcccttcccgattcccggcctaggtcctggctatggaagtcagtacctgccctgaggtgccccccaggacggggcggcctccctgacagccagccccccccccagtctcaggaggcattttacagtgagcagaagcacgttctggtccagcaacaagtagatgtcagttggttagggtaggagttggcacccgttcggaaataggagaacctgagagtgcagtcctgcccagggcacaactggaaggctgtgggggaagggagacacccattgtggaaatgggtgcggcctgccttcagtcttgggggtggatggagtaaattatttgaattaagaagtcctaggtggctgggtgcggtggctcacacctgtaatcccaaaactttgggtggccaaggtgggaggattgcttgagcccaggagtttcagaccagcctgggcaacagagcaagaccccatctctactaaaacaaatttaaaaaaattatccaggcgtggtggtgtacacctacagtcccagtttcttgggaggctgaggtaggaggattgcttgagcccaggaggtggaggctgcagtgacccctgcactccagtctgggtgacagttagacacactgcccccgaccccaaaaaaataagtcctaggtatgagtttgagataatgaaaaataaaaatctgattttctaatatttcccctaaaaaacacatgtcatttacataaaataggaagcggggagaggtggtgagagatgacccctgttgaggatttcattggtgtctgccacaggccgccatggcatcagatgaaggcaaactttttgttggagggctgagttttgacaccaatgagcagtcgctggagcaggtcttctcaaagtacggacagatctctgaaggtgaggctgctgctgggcccgcggccctgggcgggggggcttgtgctcctcctacctggaagtacagctgggtgctgactgcagacctctctcccctgcacagtggtggttgtgaaagacagggagacccagagatctcggggatttgggtttgtcacctttgagaacattgacgacgctaaggatgccatgatggccatgaatgggaaggtgaggatcagggtgctgagcaggagtcccgtctcgaggatggggcacccacctgctaacccgtcccgccctctgtctccagtctgtagatggacggcagatccgagtagaccaggcaggcaagtcgtcagacaaccgatcccgtgggtaccgtggtggctctgccgggggccggggcttcttccgtgggggccgaggacggggccgtgggttctctagaggtgagtgccatgagtgggtcccttggggatgctgtgaggtactgctggtgggagctggtactcactttttcctgtatgtgcaggaggaggggaccgaggctatggggggaaccggttcgagtccaggagtgggggctacggaggctccagagactactatagcaggtgagggggaggccggcccaagcacaggggtggttgcgggatggccagcttccgtcccgggtcccaggtccctgggggagctgagatgagactggctgggcaaggagcagaggcaggtggggacccaggccaagaggagaggagactgctcaggacattcgcagaagcgggagggcctgggggacaggctggtggagattttgaacaatttccaagatgctgccctgctggggtccttgttgtgtccccagaagggacggctggcatgggggctggcggctcagcctgttgtggcagagcagaagtagacgggtaccttccggtactcaacgtttgtctgtcttgcagccggagtcagagtggtggctacagtgaccggagctcgggcgggtcctacagagacagttatgacagttacggtaagtcacactccgagggcgccacgctgctgtggcctgcggtgggagctcggttcaccttggtgccctctccaagcactttaggctggacactcagaccttgtcactgtgcttgcccagaagaggcgcatctgtcctctcagagccatttctatcgcaggacgcaaaagccaaatgagactgaccaaaaaggcaagggagagcgagggcccgctgggcagtcagctaggtgcatgtgtggccgcaggccagcctccctcggctgtggggggtggttgctccccggccgcaggccgcgccctggtctggcctctggggtgaagctgcctcttgttgcttcggtgcctttacactgtgcctgcttcttgtcctcagctacacacaacgagtaaaaacccttcctgctcaagatcgtccttccaatggctgtgtgtttaaagattgtgggagcttcgctgaacgttaatgtgtagtaaatgcacctccttgtattcccactttcgtagtcatttcggttctgatcttgtcaaacccagcctgaccgcttctgacgccgggatggcctcgttactagacttttctttttaaggaagtgctgtttttttttgagggttttcaaaacattttgaaaagcatttacttttttgaccacgagccatgagttttcaaaaaaatcgggggttgtgtgggtttttggtttttgttttagtttttggttgcgttgcctttttttttttagtggggttggccccatgaagtgggtgccccactcacttctctgagatcgaacggactgtgaatccgctctttgtcggaagctgagcaagctgtggcttttttccaactccgtgtgacgtttctgagtgtagtgtggtaggaccccggcgggtgtggcagcaactgccctggagccccagcccctgcgtccatctgtgctgtgcgccccacagtagacgtgcagacgtccctgagaggttcttgaagatgtttatttatattgtccttttttactggaagacgtacgcatactccatcgatgttgtatttgcagtggctgaggaattcttgtacgcagttttctttggctttacgaagccgattaaaagaccgtgtgaaatgaaccttgctctgacaattcccttgcattgcaccacacactccttgctgcgggctcctgcagccagacctgagcagagagagaaggtggagaagcagcgggtctgcaagccttccctggggcctgcagagctagaaagggaggcccagcagactggcgctggtcagggtaggggagccaggcgggggacgggagcgggcagctcaggcctcagggcagccctgggaggcttctggcagtggtggccagagggctggactgtgcgggcagcttagcagggacagtggacgtgcacctgacgctgacctggactgcctcagtctagaagcaggccagagagcagaggcacgtggcatcccagggcgacctcagacggccagccggttagctagttctgctgttgcttcacgagttctgagcattctctgctagcctatggaagctgcagccctcggaggacagaagtgttgtgcgcccaacagaaccctctgagacgcaagctgctcccttggctagctcatatgtggaaatagccctgtaattcgaggtaactccttccgctcgtgtccacatccctcttgttgagagctcactgaaagtcatgtgcccggggaatgttcctgtgactgttttttgtttttccttttttttttaactttgtttttgtttttttcaattaagctggaactaaagtcaggcccagccattacgctccccacgtgcagccaggtgcagcctgggcccagtcatgcctggctcatagatgaaatcccttaagcaggattgaagaccagtgaacgcccccgccttttggattttttgctcaattgaccgtcttttccagacctctttaagtcacactcttaacttagctttctctgatgtctgttgccgccattagtttttttctagagcccacactggcccacatagctccatcccatacgggtagctggctccagctgcgccaaggtgcagacccgccctgggcatgctggcctgtgacggagcctgaggtcacagccccctgactagcctgagaccttcctaggggctgtggctgtttccggggaggccgggaggggcagctgtgagccctgtggaggacgttgggagtaacgctgctttgctttggcaggttgaaggggcccggccaggactcggggaagggtggcctgagagcagcgatgacctctggggtcactgtcccaggagggacttcacctggaacaagagctggaggcagccgcttgcccaggaggcttgtcccctgtaagtgctttcgggaagagtggcatgtggcgctgagccctgtcccgggcggcacctgggcgtttcagtgagtcctgctctcccgcacctatggccccatggcgggcgcctttcggtgtgtgttgggtgcagggcagcgcctcccgggagcgccgggtcccccgcctggagcccgcgcctgttctccctcccttcctcctccttccaggaggcgcttcgccagtgaggtgcgggctcagggcctcgagtctctcctggagcacgggctgcggtgcgccggcagcttacggggcggccagtccttgcccacaacgatgtggagccctgtgaaagtcggattcgaataaagggccacgtgtgcacccagaaagccgagtctgtggttcaggggggtctgtcggcggagcggggccactggaagaaaagcctgcggacctcggttcagcgcacgagtaggacccgacagggaagactgcaagggtcattgtccgagcagtgaccgcggggggctcgccactgagggggttcgcagcgcggagactccagtctcgcgggatctgaggcgcactcggcttcgagggagcggcggccgcgcagccgctgtcaggccccgtcttgggccgagtcccgggttccctgtagcaggcttgggagcggggcgccaccttcctgggccctggacgtggccgacgcgttctcagtgtccgtgaggccggggcaggagtggcgggggtcgccccgaagtgggtgggaatgagcggcccgaggtcctgaagtcggggtccgccccgtctccccgctgccagcccgatttcctcggaagccgcgaccccccacgctgggctggcagttctgggctctgccggctgcgccttgccgggactcccacgggcgggctccgggcctccgtcctgatcccttggagcggttcgacgaagcaagttccgcggcgggcgcgcggggcactgtgggtagcgccggggctcaccaggcggaggcggggcccggcgtcaagctccgcctccgcgccccattggctggcatcacctccgcgcgcctgactgacagcgcgcataggggcggggcgccgccaccgcttccgccgggccatggggccgcgcgtgctgcagccgccgctgctgctgctcctgctggcgctgctgctggcggcgctgccgtgcggtgccgaagaggcctcgccgctgcgccccgcgcaggtcacgttgtcgccgccgccggccgtgacgaacgggagccagccgggcgcgccacacaacagcacgcacacgcgtccgccgggggcgtcgggctcggcgctgacgcgctccttctacgtgatcctgggcttctgcggcctgaccgcgctctacttcctgatccgggcgtttaggtgcgtcaggcgcacgtgggcgccgtctctcagccttggccaattagcgcgcgcctagtgcgtcacgtgccgggccgcggggtcctcccctccctccctccctccctccctctctccctgttggagtgggcgtgggcggtgctgtgcggggtcgtcacgtggtgtgggcggtgcaggggccacgggactcacccgctctccagcctgcgcctggggttggaggtgcccagcgcgccgcctcttaactcgggggtgacgctgcccgtttcccaggtggggccactgaagccggagcatgccgggcaggggtcaggccctggcggggcgagggggcctccttggctccttgtcgccggatgcccgtcctcgttctcatcttcccgcctgccgccaggcctttccgtggggtcccgatattttcctttctgcttctacccactgaagctggttcgtcgccagggtcggccacgtgcccgccttgggtgctcccacagcccgggaggtgcagctgcgtccccagaccctcgcgggggtctccagctgtaggcagcccctgggcaggaggggcttctgcgtgttcaggccaccccggcttccctggcctgtggctccagtctcctctgggctcctgactacccagtgtggctgcttctcccgggtgggagagacacagcgaggaccttatccctccccatcaccaccctggcaaagtcaagccgctttttattttttataagtttttattgtagcgatggggtctcgccatgttacccgcgctggtctgaactcctgggctcaagtgatcctttttcgttggcctcccaaagtgctggcattatagatgtgagcacctgcactccgccatgctgctttttatgggccctgtgcagagcctcccctgtgctccacacctcttcctgtggaagcacctgctgcgcgctctcccctgcctgtatgccgcgccctccctgcctcccgggctgctggggccaccaggggcttggccctgagacaggcttccattctgttgtctttggcaaagtctcacccctgtgtgagcctcagtcttttcatcagtgcaatgggagtgacatcagcgtgcctctcctggggtcctggcgcaggggagatgggagggcctggtagggcacatgtcttcttactgtcatcgccatgggagtgaatggtaatcacttggcgattaggacatgaaagaagcaggcacagcaaaaccagggaggtctgcagcagggctcggggctccagtagaggacggcaatgagagtcctgagggaaggaggaggcagggttggcggggaggggccactgactatgcctggacctacttccaggttgaagaagcctcagcggaggcgatacggcctcctcgccaacactgaggaccccacggagatggcctcgctggacagcgacgaggagacggtgtttgagtcccggaatctgagatggtgtgcacccttccccagctctggggcctcggtgggcaggctgggctggagactcagcaggaccctggggacttggccaagccatggagtggtccctgcaatcacagctgacagcggtagtcaggccatggccccactgggcagggctcatcccttctcccagcctccatttacaactttttttttttaaacttaaatgtttgtcatttatttatttttgaggtggagtggcgcgatcccaactcactgcaacctccgcctccgggattgaggcgattttcctgccacagcctcccgagtagctgggattacaggcacccgccaccacgcctcgctaattttttgtatttagtagatagagatggggtttcaccatgttggccaggctgggttccagctccttacctcaggtgatccatctgcctgggcttcccaaagagctgggattacaggtgtgagccaccgcacctgacctaagttttgttttgttttgagatggagtttcgctcttgttgcccaggctggagtgcaatggcacgatctctgctcactgcaacctccacctcccaggttcaagcatttctcccatcgcagcctcctgagtagctgggattaaaggtgctcaccactacacccggctaatttttgtagttttagtagagacagggtttcaccatgttggccaggctggcctcgaactcctgacctcaggtgatctgcccgcttcggcctcccaaagtgctgggattacaggtgtgagccaccgtggtcagccttcttgcttttttaaggcaggaaagcggctgcagggcttagggtagtggttgctccatctgggcccctccctgagggatgaggtctaagtcaggtggagaactgactgcaggatgcttctgagcgggcggggtcagggagggcctctccctggtgtaatggggctggcttctggaagagtgtctcaggccgagggaacagcagggagcggccgggctgcgcagatgccgggcgggactggggtaggcctgggcatcgaggcagctgtcaggggttagcagggttctgggcagggaatgatgggtatgttgcgctgcagtgtggctgctggggggaccttggcctgttggggggtggcaggcatggaggctgggagaccaggagactgggcggcctctggggacagctctgactttttgagcccccagggagggaggcactgggatccctccgcatgctctgactccattctgggaacccctcccaggtttcttctacctcctggctgggggccccttcccccggagtgggcagttgcacagggcccaggaggccggggagggaggccagtggggggaggctgggccctggtagaccgaggggcctggacaggctgcctgcccctgcctgacctgggtgagcctctgcccggcagggcgggcccttcactccttccctctcacccttgaccccctgctttcagatgctgagccagggaggcggcccttccagcagccatgagggaaggacaggagatggggcccaccccagtgcccagcaaccccctgctccaccgctcattcccctgctggccccggggctggtctcacccagtgccaacccgagagctccttttggaacctgcacagcccgccgacctgttgccacctgcacccaccgctggaccatgcagcctcgcctcctggatgctgtcccagcctggccgagggtcccaggtgaagactggagggaccccaacagccaccgcccaggacgctgaggctcccttgcctgactgtgacttgtgcctctctcctgcccccgtggggacatggcagcccagagccaaggctgggtgggcaggtgacccaaggaacctttctgggaacaccttctcgccgggctgggaacaataaatgcagccatgtctctgcagctggtgctgaccccatgccacctctagacccgtgcgtactggtgcagccagtgtgggggtgggtggcggagcagggctcaagccagcctcggttccccatctgcgaccatgcttgggttctccagccttgctcccaagtaaggaacccatcttcagctgcctgggatgaggccctgcctgtcagcatctctcttcctagagagaactcctattcatccgtcaaagcccctgccccagggccccctctatgccatcccttcagcctgggtctcatgggccctgccctggaggatccccacatcaccctcatgaatacctctggcaatgattccagggagccccagagctctgctgcaggaggctggagttccgtgcggcctgggtccccatgccggacactcctcccccatctgcctcctgtgggacttggagcctgagaccccatcccaggcaaggtgcttaatcagcttccctggggccttgttcttcctgcaggggcctgtgtctgggcggagtccagccctggcctgtcatcctgtcccccatgaggttagccttggagagaccatggtgcgtgggtacccatggcctgaggtcccccacaggcaacctgtctggagctgccactgccctgtcacgaggaggagctgccaccaggtggcagccttgagccgcccagtcctctggctgtctccttggtcctaacccttcatgtgggaaagcaagtccagcacagcccatttgtcactccacttcctgaacccaccgtgtcctcacatccactgggggatgggcagtcccccaggtttgcatctcacatacctgccgaccctccctgtctgccgccagggttgggaggggctgtctccactgggggccaggctatcgccccttcagaccagggtcccctgtcctggtactatctgttcccttgggcatgtccgtctgaccaggcctgccaagactctgcttacgtttctccttccccttccagtgccctgggtccttctctgccccagcctcagctgccgcctccaggaagtcctccctgattgcccaccccagcctgttctttaggggaatcctgcagggaaggttggggaagcaacccttaaagtgagggcagagcccgagggaggcccctgagactgcaggtggggagggcagcttggctcagcctggctgtgtgtgggactggggacaagcaagtcacacctatgactcgggctctgctgttccccatctgtctggccgttgcgtctgtctccaaactcccgtttgcatctctccatctgcctccttcactttgtctctgtccgtctctgtctccatgtctgaccctttgggacacacttttaacaggcacggagacaccagccccggcccccaaccctgtgatctgtgccccccgtcccacagctctgagcgctttcaccagcttcaaaaggcacattaattactctaatgaggtcaggagagacccacgctctgccatccggagtcggaacatgccgcagcccccagcccagccgccgccgccccccgctcgagcagggagaggggctctgctgcctccgtcccctctgcctgtcggggcccgtgctgcaccccacgttgctgcagagtaattggcagccccccaaggttaatgcactgttagccaggggttctcctgggctcagagccggagaggggcctgtcagcgagaaatgaaaggccccaggtcccggctggtgctcggcttgtgagcgtgtgtgtgcccgtgggagtgcgtgtgtgtgcgggtgcctgggagcttgcgggggcgggcagtggcttcctccacctctcccacgcagacacgcagacacgcaggcacccacaaaatacagtctcatagacacacggtaagcaactcggacagttccatggatgggacgcccgcagccccgtgggacacgcgatcacacacatgggtgtgacctgctcagctcctaaccccacgccggggagtgtctcagacccatgccccccacccttgcccctcggtgtgcccactggacaagcagcatatcaggtctgtgcctctgggtgggggggggtgggggtctctgcttcagcagcgggccccgcccaggctggagtccagtggactcactgcggggcttctccgcttgtgaaataggggcgggtgggcgctggggacgtggcctcaaaggcgggatgcgttgggttccttgcggcgccggcttgtgcccacagcttggggccgacattcatcctggggagatagagacagggctcctctgccgccctggtgccggggtgccccagggatgtggccccatgtgccaaatcacagtcactcgggttggcaggcgacggagggctctctgcctcttctgggggtgctgagacccctgtaccctcgactccccacctccagggatctcacccccaggtgcccatctcctctgtggggggcctgagccaccactgaccccacattaaggccactgacgtccccgtcctaggccagccagcccctgagaagcacccagtgctttgctgtgggacacaaagccacacatggctattcacgttatttcattaagttacataaaactggaggtccagggcctcagtcaccatggggagaggtcctcagtcgccatggggagaggtccgggtcctcagtcgccgtggggagaggtctggggcctcagtcactgtggtggacagcgattggtgggggcagggacatttcctttgtcttggaaagttctggacgctggtggtgtctggacactggagaacgggtctgtgttcaggccccagacctgaaggtgggatgagggagagaggaaggaggaggaaggggaggagggaggggacagagtgggaaggagaaggatgtgaatggagaggaaggatgggaggaggaaggaaggaaggagggaaggggaggaggaggaaggagaggagggtgcagaggatgggggaaggaggggggaggagggtgtgaaggggaaggagggaggagggagcggaggactgagaaggggaggaaggtgtaaaaggagagggagagaggaaggaagggagggggtattaagggggaagagagtgggaagggggaggagggaggggagggtagtatgaagggggaaggaaggagggaggggagaagggtgggaaggggaggaaggagagagggagggaggggaaggtgtgaagggaaggagggaggggaggtgggagggaagtagggagggggagggaggggaaaggtgtgaagggaaggagggaggggaggagggagggaggagggtgtgaagggaggagggggaggagggtgggaggggaggagggagggaggagggtgtgaaggtgtgaagggaggagggagggaggggaggagggagggaggagggtgtgaagggaggagggagggaggagggtgtgaagggaggagggagggaggggaggagggagggaggagagtgtgaagagaggagaatgggaaggatgggagctggggaggagggaggagggtgagctgggaatggggctgtgtgcctgctcttttccaccactggctgcaggggttgcaggaatcttgggtccatggctggatgggggtggggattttcatgttacccactggagaaagggatacatttttattttcaaggacagcgacccagcccaggggaaacgcccctggcccctggggctaagcgcagaccccagctccgtgcttcgcaggtggggggcgatggacagcggtggggctcccgccctgagtggagcctgtgacctgcccgggccccagcgccccgtgacccctgccgcctgatccttgcctggctgagatggggcttctgaaggctgccggcaccagggcaggcagcgcattgggtccaatttattctgtaatgagaaattctccccgcatatttttagcttcctcctggcgtcgcggcctttgaaggctgaggggctgcgggacgctgatcccaagccctgtggcctggccatgtgggcagtgggtgctgggcacgggctggacaagtcccttcctgagtctgggtagaccccagtcccagcagtgcagagcagggggcggggccagaccccatcaagccctgtactggctccagaccagggactgagggcgaccctggataacccctgaccttggcggacacctgttcccagagtgagcctgatttctgacccttggctccacaggaagcttactctagagtgacctccggccgcggctgcgtcccaaagccgggacagctcccagccccaggagggaacagggcttcttggacccccacagtggcccccctgccaggcaggggtttgccggggcagcctcgcccagggccaggcctcggagacgccctgccctcccctcccttccccaggtccttcctctaggagcggccagcgggcgcggggaggttgaatgggggacgcaccgcctttgttcccgtccctgcttgggctctgaccttgagagagacaagaacagaaggaaaacggagcttctgctcaaatccgttcagcggtggcggtggtggcggctctcgcctcggtggcccctgcatgcaaatgagtggccctgccatgcctgggtggaggtggtgcccttccagctcccacctgtgcaggtcccagtcctggtttgagaagagaccccctcctcccgaccctggcccacccctcctcacccacgagatcccttgaagcaggagggggcttctggtcccagggtagaaggaagcttccagaactcccacctttgccaggtggcatgctggggccgggcacgccaagaccccaggctcacggccccttgtcctgtgcttgggtgcagccgccacactctgctccgaaagtgctcacctccgggagtggccgtccccctccctaaaagagccccccaccagacggagccgcccgggaagcttctccagcctgtctgggctacagagccttgtgtggctagaacccaaggccctcactccaggggtgctgagagagcctgtccagagggcctgcctcagccaccacctgggacaggttcacgccctccactgaagagacacccggccagccctgggccttcgacctgggacgtctgtagtggggtcaggggatgagacctggagctcagaacagacgggctgagctccctggaggagagagaactgagaaccttgtcctggcagggacgctagagcactgggtgggacagacctttctggaagagcaagattttaacaggaagaaaaagtggaaggacttcccagcaggacccagcctgaacaaaggtcaggtggtgtggcccgcgtggcccgctggggaatcgggggaggagggcacgcaggagacacaggacagagcccaccacgtctcagagctgtgggacggtggtgggtccggtccccaccccaccttgctggggcacaggttagcttgcccatctctgggttcacggtccctgccaggagtttgggtaatgcctcacacagggaccttcgggtccaagggctgttggtgcttgccctgcagttccctctcctgcactgggcctggtgaatgacactaattcagagacgtacaacacgatctgggcatcgccagcaaagtccagccagcgtttgatgacagcctaccctccacaagctcagagtctggtgagggaggctgtggcatgaataagggcaaaaacagagggcaggccaggtgcagtggctcacgcctgtaatcctagcactttgggaagcccaggtgggaagatcgcctgagcccaggagttcaagaccagcgtggccaacatggccagacactgtctctatagattggaaaaaagacaaagcagaggccaggcccccagttccccacctgtgtcagcctaccaggaggagaaatcactcggcgttccctgaacagatcagaccccgggtctttgcacaagctgtgcccccgggcagcggccctcccctgcctgcaggattcgtgcgtggagactgatttgctgtcggccggggcttcactctgggcttcttggatcccatccccagctgctcacactccacatcggtccacctactatgctcccggcacccttagggctgaggtgtagggacttactccatccccagggaacagcgtgggtccggagaggcgactcccaggagggccccagggaggtcgcagcccgagcagctttggactttggccagcgcccctctgaaactctgccccggcccccgcagggagactggagttggccgagcccgatttgggacgcgtgcgtcggggttggtgaggctgcggatagcgctggaaccgggcaggtgagaggcccgggacccagggccgggccgggtggagcgcgtgggggcgcgggaggcagggtgcgcccccgcccctcggagaccccaggccgggccacgcggatgccggcggggggcgcgcagaatcggggtcgctgggggcaggccccgggggacgagcctgagacggggtgggccggggcagggggcgggcgcaggctggagacccccgcccagtccccgcgcggccggggcacggcgggagggggcgcccgcggccctcccgacgctcgggcgggacaaaggccggagcccgggcccctccccggcgggtgcggcggcggcggcccgcgctccgacagtccgcgcggccgggtcctgcgcccggggcgaccccggcgccccgccccgccgccgcctgacttctcggcgcccgaggtcgcgcgcgcggaggcgggggcggcccgggatctccaagcgccgccgcgccctcctcccgcccgccctccgcccgcccgctcggcggcggcggcggcggcggaggaggcggagaaggctggcaggcggcggccgggagagcgagcgcggcggccggaccggggccatggcgcccgcgcagcgcccgctgctcccgctgctgctcctgctgttaccgctgccgccgccgcccttcgcgcgcgccgaggacgccgcccgcgccaactcggaccgctacgccgtctactggaaccgcagcaaccccaggtgagcgcggccgcgcgcggggggcgcccggggaccccccaacgccccccaagccgcgcccggcctcgcgcccccggagctccgggcgccccccacgcgcgcgccgccgccgggatgcgggcgcccggttcccgcgggagccccccagggagctccggccccccggagtttgggggactcgcccttttcgcgcctgccttccccggggcgccccattgccctacggactgtggggactcgcgccccacatcccccagagcgccgacgtctcctggagtttggggaacccctctggtaccctccgatgccgggtagcccctgagttgcctgcctggacttggggggacccctgatccacccgcttctctggggagccccctcggtttcgcatttggtggggatccccggggaccttggcaccggaggtgggggactgtggccctcgagggatctctgggttcgtcctgcccgcaggtccccagatgaacttggggaagttggagtgtccctccctcaggacccagcatctgcttcactccagggggccaagggcccagctttgaaaggagactgaggggccggggagctgggggtcagccccgggaggggcagtgggatggagtcctctcttgtcctctgggcgctgaccaggaaactgaggtgcagaggggatgaggagctggctcaaggtcatgcaagggggggacttgggggcaggacccaggtggcccagtgccctgcctgccacgcccggccgagatgccgcacccgcctgctgcaggcccccttgttttgaaccaggtccgggccaggcacaacgtgggggacaggagaagcccccgttggtcagagcaaaaaaagtttgccggggcctggccatggcctggacgtgggtagaaccctctgaaccatcccagggtctccaagacaggagcaggctgcagcttccctgggggtcccgtgggagccggggctttgggggtcctggggctcgggagggagtcagccccagcactcagggtgtcaccgtcttcctaaggcacacggagctgcacatcgggggctgaggcggcccccccccactcttctgctactggtcactttctctccgttttccagccgcttcctgtgccgaccgagccgccctctggagcccgccacccctccttgtcccctctgtctcctgctgtcctcggtccccgggaggaaagttgcatgaaggggtctctttgaggcgggctcggggacaagggcggcccgtgttccgccgtgggggtggggaacacgcacaggcccaccccccaccctggtcaacggcctcgggtcgggccctgggggctgagggcagggaccccgggccgctgggggacggctggcccacctcagagcgggtccccgagccgcccgctgtgctggtcacatgtgggtttgattaaggctgtcgctggccgtgcggggagtccagcgggcagcgcttccccggcccaagtttttggtttcagctgcggaatctcccgtccccagcgtggcctgtcctttgttctagcaaacgccaaacacacgaggacccggcaaccgggggaggaaggtggtcaccagggccgtcctgctgccccacctgccacagggctgtgggctgcgggccggacccccggccaggggaaggaagtggcctccccagtgcctggcttggcccagccacctcctgttgctccgggtctgacctggttgcccagctcaaaccgctgcctgagggaacggccttgctggtccgcagagccgacctgggcagcaccgaggctgcctcctccttcctctcctgcctgcggtatccagggttgctggggacggagccgacaccctgcagtggggcccagggctgggtgagcaccttcccgggaagccgggatccagccagaatcagggctttgtcgcggacatcaggggtctctgcagttctcagatttggtgtccaggggcacctgcccgggacctgtgcctgagtggcgggggtgtcaggcacagcagggggtggtgctgggcctccgtatccaaggggaccctgtggaggggacatcggcttggggagaggagtggcgtcagccggcaggcctaaggtgtgaggctgggctggccggggagggatgatggggtcgggcaggtgtgtgggggatgcggggaccccaagtctttgagaggggcatacagaaaggcactggagacggggacagccgcgatggggggcagacagcagcgtgggcaccaggggaccgtgtgctcgatggggcctgcaggcccgggcagtgccgcagcgtcgccggccgccccttccgcccattggcctggcacctgtgcccaggcgatgactgtgtggtctgtctccacatcacaccctctctgctgtgagaggcgatgcctgcacccaggggaccccgcacccacctccttgggccgctataaggtggggccccgttgggtggtctggctggccggccccgccactcccaccggtgactgcacagcgtccgtccaacccactccccaacctgggctgggtacccctgagctggccgccaggagtctctgggcctgttcccagccgacccgcatcgggctggggcgtccagggcttggacctggccggctgccctcacctgtcctgttggacctggccggctgccctcacctgtcctggccacaacaccgcgtgtgcattcccacggctgctcatgtgtgtttgcgtgcagcggtggggaagggtggcgtgcaggtgtgcctggagtcgcatccggctgcaggttacatgtgtctgtgtgtggcaggaggctgcgtgaatccacagggcacagctctggcgtgtttgcacatgtgtctgcgtgattgcatatgaggtgcatgtgtgtgcatgagtgtgtctgtgcgtggcacccgcgtttgcatgtgcgtgcccttgcacgggatgtctgcagtgtccgaggtccctgtgcgtgtctgcctgtggcatgcatgcgttttgtctgtgcgtggagtgcaggtgtgtgtgcgtgtctgcgtgtggggtgcatgtaagtgtgtctccctgggggcagtgctggctggctgagggcctgcaatgtgggggcagtggtggccccagcacggtccacaatggcaaccccgctgttggccctccctctcctcctcccctggggacgggaccagggcccgtgtgcagacggccatcaagcctcagagcagggtggacgcaggggcctgtggtccccgggagtccccaccttctgattggaaatctgcagccttgggggcactgggtgggcgcttgcccacactgggcatctctgggcttcggccaccctcccggggttccccacggacccagtggccctcgggtgtgggcagcagccgggttcccctcaaacactggatggaaaatggtgacctatgcaagggctcactccccgagggaggagccgtcccccagcagagggcagaggtgaacggggtgtctcgctccccgtggctccgctggcgtccctcggcctctcggggagccggctttgaagggggtgatgccgtgttctgctgcataagggttttttgttttgtttgagagaagctggtccactcggcattgggggcgctaggagagccgggcggtgggcctgggggattcggggcctgagggtggggtcctggaggccgtggggtacctggactcagactcgggagtctgggagacctgggcatgacgtcaggcaggtggcttagcagcctggaacccccaggcctgctctgcgaagtgggggtgacggagccctgcggtgggtgcggctcggccgatagggcctggtgtggatgggcaaaggcctgagggtggtcccaggggttagtgtcccctccccagaagggaaaccgaggcagctcctgtggtggggaggatgcttctgccgaggcaccatggtctctgtgtctcacggtctctttgggtctctgtcttccccatctctgggcatcctggggtgccatgggtggcccaggccttccgcctccactgcaggcctccctgggcggcctcagtttgcagagaagggaacagaggttccgtggcggggggccgtgaacgcagtgggatttgaccttcccccgtctctgggctgacgtctccgcaggtctgcaggggactggccctacgtgggtccctcggggtcacggcggaggcagtgggttgtgcattcatgggggtccgggtggtagcgtttctgtggagccggtggtctccttgtcatccatgagggtcctgccccggtggccgtgtgttccccgggacacggcttctctcctccccaggaaccgggatgcagccaggccttgcccctcagtcctgtgtgtgggaccagcctctcctgcagatgggtcctcagggagagctgggctttgtaccttgctgggggaagggctgagctgctcccgtccctgtgcccaccgtcccgtcgccccagacacgcggctggagcctgcggaggagcagacgagccggcggggtttttgctttaacctcaagcaggcgtttgaactctgtggccgagtcggtcctggtggggggctcgtgccacacctgctcccagaccaggctggtgtggggtctggccgagagactcagcggcgtgtccccccagctctgtgcgccccttgtccacctgccctgtgggtcaggggcccccaattcagggacagagcagccgaggccctgaaagacggtgactcacccaaggccacccggaagttgggcagagtccagggtgtcccacctggggccggcccgggggaagccagggacagccctgggaggggcaggaaggtgggtggccgacggcagctgcactctgtaccagggccacccacgcccacggtgacggaagcccaggtggggctgaccctgcccggcccatctttttcctattttgcttcatttctagggccctgcctcagtttaccctcctgcaccacaaggccatacttgtcctttcttgggcagaccttgcaccatcccggggactgatttcccttcaggtcccacccaggtcctgagcaggaggaaaagctccagtcctcagtcaggggggacatctcttccgtccctggaaaagccaggtgtgggtgctgtcaccccagcaggtcttgctgggggtggcaggaggggacgggcggcctcagccccacgctgggcttcaggacccgggctgcctgctcatccggccagcctgggcctccccgggagcttctccaccctggaagagagatgcagacgggtgcaggcgtccacctgcccacccacggggtcctggctgccggccacaccactgcctcagtttccagtcctggaaggcagcccagcccacccccaccccagttttgggtgagattcctaattagtcgcttagctattagcgtctaataacttgacaattgcccgattggagctaattagctccaggccgcttgctggaagctggtgacagccaggaggcccgggtgggcaggaggggagccctgctgggtgagcctctgcctggggcctggagggctgcctggaggcgtggactttggcacccgcaggttgagtgagtgtggggggaaggtgtggcccggcagagggaacccggaggagtaaaaactgccaccgctgctctgtctgggaaaaatcccaaatcagtcattaaccccttagtgagaatttcagtctctctgccgctccggggaggatttgcatatcgaggcttcatcactaatggaggaagcgaaggctttgtctgcctctccccaggtgcggttttggggtgggggccccctcccccctgcaggcgccaccctcaacaggggcaacgcgcccacctcgggcttgcccgccaacttggaaccgggaatgccaacacagcaaggccgctgctattttagagacgcaaagggaaaaatacggccccactccggcaggcagagccgggggtgggggttcccctgggacctgccctccaacacacacacctgtgggctgctccccacaactctggcattgcaaagtcctcgcctcttgacctttttaattcactcattattgagcaccactgtatgcagggcctgtgtagggccctggggaggggacagaggaggccaacatcaggatccgggattcagacagcaaaccctgtaaagagcagatgtgatatggggcggggcacagggaacagcactgcaggcagtgggaacagcagctgcagaggcccttggtgggaacagggacagccgggaggctggtgtggctggaagggaggagtcttggagagaggaggatgaggagggcgcagtggatgggccacacaggcctggaggggtgtggattttattctgaggatcaggaatggatggagggctctgagccgccgccaacgtgttacagggtctgttttgcagaagagcgaggcttgggatatggggaggctgggccccggcagaccctcaccgcagcctggaggggcccgggcacctggccgctcagccacacagaagcctcggtctctgacattttaccgaaggcagaacaggaggagagaacacagtggtgtcagacgtgggggaaggaggcaccattggggaaccaagaggccagagggggacctacagggctggtgctgtgggcactttcagaggctgctctgtctcaagaagtgtcctgctaggagccaggttctttttttgggttgaatgtggctccctggggatcactgccgggacaggaggggaaactgaggccagagggcagtggggagcccagacgcccctgtggtccctccacggaggcctcccctgcagggtgacctgggtgtgggcagtcccaggcgggagctgggccttggctaccatcgaccgcctgatcaatgggctttcacttgggctgggcaggaacgaaaatgacttttcaaaaaggctggagcagcttctgcatcgatcgtgcccaaggggccagcgggtcaatgagatgcctgtgcccggccggccaatggggcagcctgaggggtgggctgaggccgagcccatctccatctgagcctgtatgggggctgcccccgtgtctgtgcggacgcaccccgagtgtccaacagccgggaggaccatccccttgcacggaggggaaagggagcctctgagaggaggccggacctcgagacccaagggttcaaatccagacgcaagcccagaactgcaagattccgaagccccggaagggcccctgccctccaggcctggtgcccgggggagatttccctgcaacacgccctcccatgtcccctgtgctgggctcacaggggtgatgaaggaggcctgggaagctctctgtccctggacgaatccaaccaggtagggaagggctggagggtgacttcaccgcctccgccgccctgccttgaaattctttgctctggagatcttcatgccggatccctagtggggaaactgaggcgcaagtgagcacacctgtctgccccttctcacccctggagacccaggaacccccggccccgcctggcgtggcatctcagggtggcggggggccgggctgatgccatctgataatcccaccaccctctctctcgagctgctgtgccaattagtgcccccagtgtggggcctgcggcgggctcacccctgcaggccggggtggcggtggctgtgccgggctagaggcagtgccagggccgggatcgtagcagcctgcacccatgtgctgccaacactggtggggcctcagtttcccctgcctgtgcatggagggaggaggcaggagcggtgtgggggaccccccattcctccctgttcaggtcttttatgtgctaataagcccctctcagggcccccctcgtgccccgcttggtccaggccgccggttacatgacaggggccctggggaccacagccgggagatctaagggctcctgccgccatcgcccgaggcagtgagggaaggggagccgccggtcccttcctcggctgatctctatcctcacagacgaggctgggtcagggggctccctggaggaaggggcctgtgggttgcgtctgggggacctcagggcaaaggcctggaggcagggctgggggctgaggtgtcaggagtgcaggcacccaagagggagaccaggaggccgccggattccggggctcggggctcgggaggtttctgggttccagatgtgagagggtggtatggggctcgcagggtcacacaggaaggcaggggtggggctgggagtggagcccaggatgtctccgagctgggcggcaggtggaactcggcaggctgagagagagggggcggtgggcggaactctgggggtgctgagaggagggtggagggattcttcacgccaagctccgttctctttggggaaactgaggccagggtgggggcagagcttgccccagagcgagctggaatgcccgacctgtgtcccccacgctgccccggtccttctcaacaggtgggagtgcagaatgaaagcagggctgggggctgcctggaggaggcggcacagatgttaagcatgttaggtagatgcgaagtttctggagagggaattcttgtggagggacagctcgtgcagaggcccggagtcaggaaccccccgccggccctttgcacacaggggtccagatgtcacccacctggacacccacctcgctgctggccctgccgtggggctgttggggacactgaggcaggaggtggggggcagtgccaggcaagagatcgtgggctcccaaccttggaagcccgccgtgattggggtgtgcaaccccacctgctgaccgctatcaccattcagggcccaggcggagtccaccttgtgaactgacccctcccccattccccggcctgacttccccgtgcacctgtcccctgacccgtccctccccgctcaccctgtcccgtgccctgtgcacctgtccccggagccatctctccccgcgcacactgacccgtgccccatgcacctgtcccctgaccctgtcccccctggcgcaccctgacccgtcccccgtgctcctgaccccggccctcgccgcgcaccccgacccgtccctcgtgctcctgtcccctgaccctggccctccccgcgcaccccgacccgtgccccgttcctcgctccgggcgctgacctctggccgccttgtccccgcaggttccacgcaggcgcgggggacgacggcgggggctacacggtggaggtgagcatcaatgactacctggacatctactgcccgcactatggggcgccgctgccgccggccgagcgcatggagcactacgtgctgtacatggtcaacggcgagggccacgcctcctgcgaccaccgccagcgcggcttcaagcgctgggagtgcaaccggcccgcggcgcccggggggccgctcaagttctcggagaagttccagctcttcacgcccttctccctgggcttcgagttccggcccggccacgagtattactacatctgtgagtggggtcgggccggggctgccggggcccgagtgggcggggacgcgggggcggggccaggaagtgggcgggaccactggggtggggccggggagtgggcggggcagcgcagtgggcggggccgcggtgtggggccaggggggagtgggcggggccgcggaatggggccaggggggagtgggcggggccgcggagtggggccagggccggtgctggccactgacccaccccggtcactgaccccctccagatgtcaagtgcatgatggacgtgccattctcccaaccatcccgggaggccaggactttcctcgtccttcgttgcatatggggaaactgaggcttggagggggactgaggctgcactattgtgatctcgggcctccagctcagaccacttggtggttgggccagtagacctggctcagccccccgatagcgagaccagggtgcccgagccccagcacactgatgagggaaactgaggcatccggagcccagcaggggaggggagcttggtggaagccacagctaggctgagtgctggggcttactcctgcaatcccagcactttgggatgccgaggcgggaggatcacttgaggccagcgtggacaacgtagggagaccttctctctacaaaaacataaaaacaattagccaggtgtggtggcatgggcctgtggtcccagctgtgcagggggctgaggtgggagggctgcttggagtgcatgagctctggtcgctccactgcactccagcctgggtggcagagcgagaccctgtctttaaaagaagaaaaaaaccccacagggcccctgccgcaccagccgcacccagactgggtaggggtctccaggtcctccctgccccgcacccacccccgcatctccccgggacccatgccaggctcggagactccctgaggaccgtggggtcttcatctgaaggttgggtggcggcagccttggggatagtcacatctgcaggaccccatggtgggccaggctgggtgggccaggctgagggaggctgccagtccctgctgcttatcggaggtccgaagctggcctttttgtccctacgaaaggccaacggcaggtggggaacacagcagcgccagccggagtcccagtcctgcttggccatgatatctgtgaccttggcgggggaatgaggggccaggcactgcccacctgagatggggatgatggcatcacactcgtggcttccgccgtggcgctgagactgagggattctcgtggagtggggaccccggcttctcagcatctcggggcctgagggatggggagtcagggatctggggtctgtgcccccaggctgcaggggggccagtgcctggacacccagctcctgctgtgtgaaattaaactttacaaggccccattgcctcctttctctgctctagttggatttttcccttttaattcagggaagaagcgggtgggggacgggggaaggtgtttaaattaagtccccataatatgagaaaaattacatttttctttctgagacggcagtttcataaagataattattgtaattattcgtcctacctctgtgatgaatgttatttttattacatgctttttatcttcatcttccagtgtgaggggtttctagggggcgggcagaggtggtggccatgagagccaggccatcaggggcccagggcccggcagagacagcaagaccacatccatgtgtgcgtgcacatggacccacccctgttcgattgtccacacgtgtgcacaccccagcggccccggcttcaggcgtccttttcctcctctcttgatccttgcagacgcccccactgcactccaggatgcttctgggggcccgaaagcaggggcggtgatgctgg[156 bp omitted]tctactaaaaatacaaaaattagccaggcatggtggcacacatttgtaatcctgtttacttgggaggctgaggcaggagaattgcttgaacccgggaggctgagattgcagtgagccgagatcgtaccattgcactccagcctgggcgacaagagcaaagctccatcacaaaaaaaaaaaaaaaaaaaaaaaaaaagaatctttcccagagaatctactgtgttgccaggcgaggtccagagagggagcggcttgtccacaggctctcagaggcagagatttgaacccaggtcaatcatttcactattaatatatcacctctttgctgattgcttgaaaacaaatacatcattttccgagctcaccctgtgctgccctggggtgaggcagagcagaacaaaaacacagacacccccaggttctggggtcaggattggacagaaggaggagcagggggaatgtgcaggagactgctgggaaacagggggcattgtgtctggggctttgatgtacgattaggagttttaagggtggctctccacctggggtcagggttgattcaccaaggtggggaagggagtacagccccaggaggtctcaggcaccaagaggcacttccccactcatccccatcccctctcttctagctgccacgcctcccaatgctgtggaccggccctgcctgcgactgaaggtgtacgtgcggccgaccagtaagtgctcagggggatgggcaggatccaggcccccacccctgtgtcctaaacccacagaaccagtgagtgttcagaagagccaggacagggggcctcgggtttccctatcttgccctgccttgccccagcctcgatttccccgtctgatgaacatgtcagaccttcgagagtgaaggttagctgagcgcagtggctcacgcctataatcccagcacattgggatgctgaggtgggagaatcaattgagcccaggaggccgaggctgcagtgagcagagatcacgccactgcattccagcctgggtgacagagcaagactctgtctctaaaaaacaaagcaggccggttgggtggctcacgcctgtaatcccaactttgggagcctgaggcaggtggatcacctgaggtcaggagtttgagaccagcctggttaacatggcgaaaccccatctctactaaaaatacaaaatttagccgggcctggtggcgggctcctgtaatcccagctactcaggagactgaggcaggagaatcacttgaacccgggaagtggaggttgcagtgagcccagattgcgccactgctctccagtctgggtgatatagcaagactgcgtctaaaaaataaaataaaataaaaataaaaataaaaacagagtggccgggcacggtggctcacacctgtaatcccagcactttgggaggctgaggtgggtggaccccaaggtcaagagatggagaccgtcctggccaacatggtgaaaccccgtctctgctgaaaatacaaaattagccgggcgtggtggcacatgcctgtagtcccagctatttgggaggctgaagctggagaatcgcctgaacccgggaggcggaggttgcagtgagcccagattgcgccactgcacgccagcctggcgacggtgagactccgtctcaaaaaataaataaataaataaaaataaagcaaaaaaaaaaaaaaaaagattaaaagagtgaaggttgaattcaacagccaggtcccccacttcaggccaagtgactttgcccggagagtgggcatcggggatggcaccaagagggagcagagggcctgcctggtggggtgatgagcccgttgggcagatgtgcaccctgagggcgggcggcacgtggggagcccagtggggttcgggcggccgctgagcgtgctgtctctgccacccgcagacgagaccctgtacgaggctcctgagcccatcttcaccagcaataactcgtgtagcagcccgggcggctgccgcctcttcctcagcaccatccccgtgctctggaccctcctgggttcctagtcccagccccgcaggacgccgaccctgcctggacggccccgcctggaccgcctgacctcggccctccggacccggctgcggcccccgcctccgagaccaaatagagacgctgcttctccctcgcctggtgccgcccccgccgggcaggggccatccacccgccccaggaccagccctcagggaggggaaacggccgagagcccccccccggaggcccgaggggccggggtgtggatgcggaccgtggccaggccatctcctctggggcgtcggagaacccgggaacctcttggcgatttttttttttttttttttttttttttttttttttagtgtatttttcgtggttggatcaaaaagacttgagtttttaatttaatttattccctgccgttgtagcggggcggggtccctgtgccctggcctgggggaggggaacgcggaacatggggtcgggaacacagccgctcccctctgctctgcaccccactcgtgggggaacacagccgctcccctctgctctgcaccccactcgtgggggaacacagccgctcccctctgctctgcaccccactcgtgggggaacacagccgctcccctctgctctgcaccccactcgtgggggaacacagctgcagcccaccgcggacccccctggtgctccaggttgggtgagtctgagccggaaggggtacgtggtgggcgcccctcattgtggctggggagacctcataccccatcgcccacccccgtcctcctggtcatttcctcccagacactgttttgccccagcgcccttcggaatcacagtcccgccgtgtcttagaaactgctttggccgatgcaaacagccccctacccgtccccctcgcctcacacggtccctctccgaggccgagaagaccttctgttcctgtaaatacagccagcaagtgcaaactgtgattttattttccacgtattcctgaggacggactggaccgtctatgttttttcagcccttcatagggggtcttttattttggtgggggggtggggtggacttttagagtagaagctgcacttggcaataagctcgtgtcgtctgtcagagcccctctctcaactctgtgacctgataatgtttctaagaaaaagaaaaaaaggacaaaagggagggaaccactaccaaaaaaaaaaaaagaaactcctccccgaagacactttaatgaaggaaacaacacatttatacggatttcatatttctacccgcctttcctgactctgtgttttatatatattatatataaatatatattgtgtacggccgccggccggcggctcgaggcacgcccggtggtggggggtgggcagagggcttttgtagggggtcggcggggcgggccgcgttgccaggcctggagctggcgaccgggcctccctcttcccgtcacaatcaactttggattctgtatttttttataataaaatgagcataaacctcaaacgcgtgtgtctgtatgtgggggccttgccctacttgaaggagacttttgcattcctaatttggcggtggatgctgggcgtggtggtttactcctgtgattgcagcactttgggaggccgaggcgggcagatcgcttgaggtcaggagtttgaaaccagtctggccaacatggtgaaaccccatctctactaaaaatatgaaaaaaaaaaaaaaaaaagccaggtgaggtggtgcacgcctgtcatcccagctactcgggaggctgaggcaggagaacctcttgaacccgggagttggaggttgcagtgagctgagatcgtgcctttgccctccagcctcggcaacagagcgaaactctgtctcaaaaaggaaaaaaaaaattagctcggcgtggtggtgcacaactgtagacccagctactcgggaggctgaggtgagaggatggcttgagcccggcaggtggaggctacagggagctatgatcacaccactgcactccagcttgggcaacaaagcaagaccctgcctcaaataatagtaatagtaataataataataataatttagaggtgggtctggaatctactggggagaggggtgcggcttcgaggaacctctggggatccccagagctgtgaacctgactgattctttggttctgtgcatcgttttggggtcagaccttgggatgagcattttatagggcccgtatccttcatagccatccatgggcttcagtttccctctctgggaagtagcaacagcccacctagggctgggagggggcagctgggaggatggagggaggagacggggcctgtgcatggctggccctggggacaccgctggccggcacacacctgaacatggtggaattcctgggcctcaggatccaatcaaatgttgtgaaatctccactggcaagctctgcctctgtgtaactcagtttccccacctgctccaggccagggcaggggctctgtcatctcctaacctcttccccttgcaaacggcacatctgtaagttctcgggtcccaggggccttcatgccaggcacgccccgattgaagaaactgaggcacagagaggctgggggtgacgcggcaggtgacccggcccaggggactgaggtctttacggctggacgatggtcgcctgcatcccacccgccgtgacgacggcgtctccggcacaattagccgagcgggaacgctcccagctaattaattcagctgcgctgggcccggtgacgggggccgcctcctaatgaggcagcccaggcacaaagacccctgtgtgtgccccgccccgcccctgcccagcgcggggtggacgcacggaggcacagagggccggccggccaccgtgctgagcaccgcgggggaggctccaccatgccccactccacagaggaccccgaggctcagagagggaggcgacccccacagcccattcatgccgagacccccaccccaaactgcaacgtgaccactgggacagagaggaccaaggacagaatgagatcagggatcatgagaggcatcccagtgctgactgtgatgctgttacaaaaacacaatagtgtccttccctccattttaagtacaattgcatggattttagtgcattgagacttgtgcagccatcagctctgattccagaacattccatcaccccaaaaggaagccttgtccccatcagccgtcactccttatcccctcccctggcaccaacgtatcccctccttccctgtctctgtggatgggcctgtcctggacgtttcatggaaatgggtcacacactgtgtggccttgcgtgtctggcatctctcactgagtgtgacgtcctcaaggtgcatctgcgctgtggcctgggtcagagcctcgctccttttcacagctgagcacgttccggtgcgtggaaggaccacgctgtgtttatccaatcatctatccaggggcacttgggtactttccaccttttagctattatgacaattgttaaaaatacaatttattattattattgttttttgtagagatggggtcttgctatatttcctggctggtctcgaactcctgggctcaagtgatcctcccgccctggcctcccagagtgctgggggtgccaggcatggtagctcacccctgtaatctcaccattttcagagattgtctctaaaaaacaaagaacaaaaactcacaagccaaacttcttgtgattacagaagtgagccaccacgcccagccaagatgctttttttagatttattatttaactctgtattatttattagagacggggtctcactctgtcgcccaggctggagtgcagtggtgcgatcacggctcactgaaacctctggctcctgggctcaagcgatttgcctcccgcagcctctgagtagctggcactacgggcatattgtgacaatcttattatttttgagacaaagtttcaatgcaaaaggtgactttgctttttcgtttttgtttttgtgtttttttgagactgagtctctctgtcacccaggctggagtgtaatggcacgaacccggctcactgcagcctccgcctcccacgttcaagcaattctcctgcctcagattcccgagaagctgggattacaggtgtgtgccaactcgcccagctaatttttgtatttttagtagagatggggtttcaccatattggccaggctggtctcaaattcctgacctgaagtaatccacctgccttggcctccgaaagtgctgagaatacagacgtgagccactgcgcccagcctaaaaggtgactttgggtaaatacacaaagaatggctgagctcctgcctctgggcctttgcatgcactgtccccccagcccaccccactgccccgatgaacctctcttgcagattgcagccaggctcccccactcagccccttccaactcagctcagatgtcacctgagctcctggccaggaggctgtgggtgccctttgtgactgtttacttacctgactcctccccaggctgcagccgctaagggcagggctgggtctgtcctggttatcgccgggaccagtgctgggcccagagcagggaatctcctgggaccgtgtcattggccacacgcagacacgtgtacacacacacacgcgtagccctgcgcttgcacctccatgcctgtgtacccctgtgtcgccagacacatgtgttttgggcccgagcctctcaggaactgacctccactcccgcgccagaccctgaccagaccctggtgcctgtcccagtggctgcatcaacgtgtcgagtggccactcactccaggggctgtgctgggatgtccccgccgggtgtgggcgctccttggggaacctggttacccccgaccccagccccagtgagaccccaatgccggctcctgccagccctggacggccattggtacgctggtcccgcgcagagtcttttccgcccagaggatcctgagggaagtcatctccctcctgccggccagttactgccgcctcggtgcccgccgcgggcagggggcagcgggaggctgctaggggaaaggaggcctgaggcgcccaaaactcttgagtgcggcttggggtggaacgtgccgccccccacagccccggtggcccagggcagggctctgcatccccccagacctcaccactgagcctcagtgtgcctgtctacatctgtgtttgaggagaaaaccccttggtccccaccctctggtccaaacagccatgatggaggggggctcactttttttttgctttttagaaatggtgtctcattcttcaccctcaaaactgaacggaggctgggcatggtggctcctgcctgtaatcccagcaattttggagactgaggcaggctgattgctggaggccaggggttcaagaccagcctgggcaacagggtgagacccccaccaccaccatctcggcaaaataaaaattaaaaaattagccaggcatgctggcacgcacctctggttccagctactcgggaggcccagggggaaagatgctttgagcccaggaggttgagactgcattgagccatgatcacgccactgcactccagcctgggtgacagagccagaccctgtctcaaaaaacaaacaaacaaaaatactgaacagctcacaccagtaatcccagcactttgggaggccaaggcaggtagctcacttgaggtcaggagttcgagaccagcttggccaacatggtgaaaccttgtctctactaaaaatacaaaaattagccggccgtgatggcaggcgcctgtagtcccagctactcgggaaggctgaaacacaagaatcgccttgcagggatccaacagccacatggcagtaatgagaggctccagaaaagaaaagaaaacaaaacaaaacaaaaataagaaaaacaaacaaaataaggagaagaaaaaaaaaagaagcccccccccccaccatccccagaggccacagcactctgtcctctggtcccccaacccagccctgacacctgcttcttccccagggcacctctcactcacgggtgttccctctttgccctggctggcacacccttcccgagtctcctctgggctctccccacctttttttttttttttttttttttgagatgaaatttcgctcttgccgcccaggctggagtgcagtggggcgatctcggctcactgcaagctccgcctcccgggttcacaccattctcctgcctc[133 bp omitted]ctcgcctcccaaagtactgggattacaggcatgagccaccgcgcccggcctatttattttattttatttttttgagacagagtctcactctgtcgcccaggctggagtgcagtggcacgatctcagctaactgcaagctccgtctcccgggttcacgccattctcctgcctcagcctcccgagtggctgggactacaggcacccgccaccacgcccgctgttttttttttgtatttttagtagagaccgggtttcactgtgttagccaggatggtcttgatctcctgacctcgtgatctgcctgcctcggcctcccaaagtgctgggatgacaggcgtgagccaccgcgcccggccactggggccactttctatcaaccacacctggctcgggcatgcacctgccctcccccatgcatacaggcccacatccatgccttcaaatggccacaaaagtgtgcgtggccatagacatacatacttgcaagtgtttctctttttgttttttgttttttgttttttttgagacggagtcttgctctgtcacccaggctggagtgcaatggcacaatcgcagctcactgcaacctccgcctcctgggttcaactgattctcctgcctcagcctcctgagtagctgggattacaggtgcgtgccaccacacctggctaatttttgtatttttagtagagacagggtttcaccatgttggtcaggctggtctcaaacccctgacctcgtgatcctcccgcctcagcctcccaaagtgctgggatgacaggcgtgagccaccgcgcccggccttttttttttttttttttggacgcagtctcactctgtcgcccacgagtacagtggcgtgatctcagctcactgcaacctccgcctcccgggttcaagcgtttctcctgcctcagcttcccgagtggctgggactacaggcacgtaccaccacgacccgctttttttttttttttttttttgtatttttagtagagacgggttttctc[131 bp omitted]accgtgctacccaccatcgcgggcaggagaagcacgtcccgcgggtgcgtcttcaccacttccggcttctccgtgggcggcgcccccttcttggccttgcgcaggcgcttgagcagcgagcgctgcttccgccacaggcccgggttcagccgccgccggcgcgcgctgttcagctgcatccgctgctccgaggacatgtccagtagctggtccaggtccacgccgcgctgggtgaagttgcggaaggtctgtttcttctgctgctgtacctctgccgtcttgctgcatcctcagaatagctctccaggcccttctttatgagacagggtcttgcctttgttgcccaggctggaatgcagtggtgtgatcatggctcactgcagtcttgacttcttgggctcaagggatcctcctgcctcagcctcccgagtagctcgaaccacaggtgcacaccaccatacctggctaatttttgattatttgtagagatggggtcttgctacggtgcccaggctgatctcaaactcctgggcccaagggatcctcttgcctcggcctcctaaaatgctgggatcacaggcgtgggtcaccgtgcccggcaagctctgggtcctcctgcacggtcgcctggtggagcagaaaccaccgccagcggctccccgtctatttgtctgtgcacattcctgggctcagacggtggcttccgaggccggaacttcggagtcacctgctccgcacttgagtctggaacgtctcagaccggacccctccctttacagcctgagagagggagagaccctgcccaggcctcccaggggcctgcccacccgacagctcctgactcccccaccctcattggtccagaaatggaaggcttcggcccaggagcgatcaatgcaccctaatggacatgtgtcggggggggggggaggggcgctgagtcgcaggagacacccttccctgtgcagagggggaaactgaggccactcccaggccccatgggtcactggcccgaagcagtgtgagccctgccgggtcaggggttgcatctggagcagcccagggagaatgaggctggggacccttcattccgggggtcattagggacaccccaccaggctgtgtgtgcccagggtggtctcttccccagctccgactgccccgccgggttttggggcttacggttctgtcctgggctcaagtcctggctcccaccaggcactgtggggcatcccctctgggtctggggtccacagtgcctgtctccaggcgtgagagaagcttctagagacaatctgtgagcatctttcccatccctgcctctccccagctcaagctccgaagggaacgtggatggcaggagagaggagggaggcgtggggcgagtttatctctcactggctttctccgcccccacctggcctcccctggggcttctgtgattctttgttttttttttgaggcagggtgtttctctgtcccccaggctggagtgcaatggtgctatcgtggctcactgcagcctccacctcctaggctcaagcaatcctcccacctcagcctctcgcgagtggctgggaccacaggcacgcggctccatgctagctaattttttttattttttgtagagatgaggtctcgctgtgttgcccagactggtcttgaactcctggcctctggtgatccttccacctcagcctcttgggtagttgagactgcaggcatgagccaccacacgtggctaatttttgtttatttatttatttatttttgtagagatggggtttcaccatgttgcccagactggtttcccaactcctgagctcaagggatcctcccgccttggcctcccaaagtgctgggattacaggcatgagcccagtctgagacccactttgtagataaggaagatgaggtcagagaaggggagtgcccaggccctgggccccacagccgggacccctttagggtccagtggatggcgaaggggaggcggcctgaccactaccgactccagccagtcgccccagcctccagggagagcagcacaggtgcccagagaagcgacgaatctggatatttcttccccacatgaggaggagctgggggcacctgagtgggtggtctcggtgctgggcggtcctcatggccccctaagcgtcgaaaaccagagcttgttatgatcttgtgatgggaagggggcccgcctctcgcagggaccgctgtcggccccctctgcccgcccaccaggcgctagagttatggtttgcaatatcccatgcccctcccagcctgagcattaatgacggtggtatccgagtccccgagcacccggggctgttattaacatcgtccatcacgcttgtggctgcggctctagaagctctttggctaggaggggaaactgaggcaccgagaggttcgccttgacccctgcgtgagggcacagctgcagacatcggataagcccaggttccagtgccctctccaccacccgctgtgggtgaggcccctgttctctgagcctcagtttgctcatctggaaaacaggctagtgacacagggtggggtctcagatcctgggggctcttgatgagcagaatcgccaggcccatggaggcaggccctttgttgcctgatctccccgccttccctgtgatcccattgtctggcacaatgccagcaagccctcctcggatgtttgttgaatgactgaatgagcgtgttgtgtgtggactctgagtcaagtgctctttcttgccaactgggaaagactggaggcaaagggctcattctccatcattcactcctccaggaaggcctagggggcaggggtggtggtggggaacggcctctcgcaggtgaggggggcagcgggggaaccgcgggagtcagccgtgctggctggcagatctttaaattaaaatgcatatatacaccagataaataaactcggcccacatcctggtgacaggcagaattaagttgcccagttggggaccgggcagcgaaggctgggggtggaaggggatggggccgaattaccaagggcggcgactcagctccatcctctgccacattgtatcccatgaacgttcctgagacccctgtcctgccgggtctctgggaagcgctgagggggtcagggagtaaggacccaaattctgagccccaagttgggcacccaggatctggcccggcttagagagagaccagctgcccacggggtgccctgggtgagtcagtgtcttcgtctgaaacagggagaccatggccccccgtcccagcacagaggctgcccttggcagtgggcatggggcggacctggttcaagtcccggctgagcactcaagggctgggagcagcctccgtcgggtcaggtaccagggagaccccgttctagctcccagggaggcccccgtggggcccgcacagctgcagggtcctccctgggcccttccctctgacccaagcccaggggagaggggcggagggggcggcgggcagttttcaattacggagcagctaatctcccagtgagggccgttctggggcccagtaaatctattatgaaaagcctctaaatgtatgtaaaaccggcctccgacaatccggggattaggccgccgggaggggaaaccgaggcgcaggccgcctggcggattagcgcagcggggcccctggagggttggggggagcagtccccagaggtccagggcagagggagaggggtcctctgaagaagccagcacccattttatagctggggaaactgaggccggggaagggccccccccccccccccaccaggggtcccctctcagcgtcaagggcacttttgccagccgctcctgcctttgtcgcaaacccaggggtattttcccacaaggtggactcggtgggtttgaaagatggggagctggggacccctggacccggcttaaggctccgtggcccggcccgcatctcctgccgccgtcgcaggccctttgaagctgccccatcctttggtgcttttgaaatgtctttattaatcacctaccgtttgccaagccagaggtggcaaaggtaacaggagacgggagcccagtgccctggcagctcagggcactcgccaaagacgaaggcagccgggagaggccttccccaaggactcccgcttccgctgggaggtggggaggaggaggtcaccccacagaagtgcggtgaggccactgcaggcgcgagggaaggcctggtggccgaagggaggcgtgagctgagaagccccgtgcctgggctgctcctgagggtggcagggagccctcggagggcttgaacctaagtggcccctgcagcatccatggcgggaccgtggacctccaagcccgcctccctcggaagcacagcttcctcagcgtggccccacactctcccaggctcacccagccccctcgcatagggcctgctcaccctcctgcctgtggggcccttggtccagcagtttcctctcctgcacactgtccccacctgctgaagtccgtccaggagcccaggtgcatgatgggagggggtgatgcccctcctcacccccacctagtggagtttgcaggcagctctgcagatcgcctggcagctggagaaactgaggcataaggctgggcgtggtggctcacgcccgtaatcccagcactttgggaggacgaggctggtggatcacctgaggtcaggagtttgagaccagcctggctaacatggtggaaccccgtctctactaaaactacaaaaattagccgggcgtagtggcacgcacctgtaatctcaactactcgggaggctgaggcaggagaattgcttgaacccgggaggtggaggttgcagtgagccgagattgtgccattgcactccagtgtgggtgacaagagcgaaactccgtctcaaaaaaaaaaaaagaaaaaattgaggcatgagctgacagctgtttctgcaggcctcaggcagcacccgatggggccttcccagggcccctggcctggcccggctccagccaccagcttgtccctgcctcccaggtgctggggaatgaaagggaggcgagtgatttctctgactccttcaggcccaggcctccgaattcctccaactcccaggtgaggggttgtgcaaagctgcagcagggtgggaccgtcccagtgagggtgattctggagtcggccatggtgggcctgctctgtgacctgggagggggtgtgtgcctgtctgtgactcagtttcctcgtccgtgtcatcagcaacggccaaatgccgttcccagcactggatgggggtggagggcctgaggggtgtgggtgggggggagctccaggcgcccctgccccccgcccagccgtcagtcaggctggccgggcccccttcaagtcgtcacggcccagcagcggccacgggagggattattccggcctgtccagggtggactgaagtggaaccaaggctgacgagcggaacgcgcccccatggacccagcccgcccgcctttgtccgccgccagccccccacccgcctgccgtcacagaccccgcctcccgtgcctgagccccatttctctgggggccgggctgcctcgcgtggcccccgcctgactaaagccatgcagcttctcggccggctccatccgctggctgcctcagtttccccctctgcagcatgggcatacagggttcctctcgtcggctcattggctgctgaatgggggctgtgtgggcagaggctctcccggggctttcccagggtgctcgggggtccctctgcccggtccctccactgtgcctttgtccaggaaattcgaggtggcagggagaacggatccgctctcggcctgaacggagccgcggcaaatgctgttgacccctgaccccggccccctaatcccggggttgaggctctcaccggagaggggccctgggagatgagctggggcacgacccccgccccgggcaccgaggggggcttccaggtcagggtcggagaggcttcgggaggacgcggctgccccattggccacgtgcccggtcatcacctctcggaggccaacacgggaaactgaggcgtggaggagccctcctaagccccacagctctgggatgggagccaggcctagccacctgcagggagagagacacggccggcagctgcccctccctgagtcaccaaacaggaattccgggacgtctggctggccctggaaggcacggctagcttacaaacccccagtcttcaggaacctctctgggtacctggcccctgtgttccccggggaggccccaggatccccttgtctggaacagggggaggggcctttctggccaccctctgctgctctacatttacccagtgtcttcaggaggaagaaatgaatgaatgaatgaagtggaaggtgtcctcatgcctgccagctgctgcagtctagcccccgtgccttgtggctacttagaggcctcagctagcagcatccaccgcagattaaaagattctccgtcggaggctgggatgcgctcacacgcttgggcgcccctgcgctccccggtggccgtgtgtctgttccaccctgccgagctgttccccacgatcaatttcaatttggcctggtctctgcctctgcagcacgaccctccttgggggccgacggcggggaaggagttgctggcttccgcagctctccccccaggtccctgggaccctcgcctggtgaagagagagctctgctgggccgcctctttttccgggcctcagtttctctgggtttggaatgagggcacagggcagcgcagtgtggacccagcctggttttcatccaacctcatgaagtcactgaatgctcgccgtgggcctgaccctgggctgaaccctggggcaccgtgggggctacggcaggcaaacgagtcggaggcagaggaagggcgttcctgcaggggggaggctgtgtgcagaggggtagagggagggaggcaggagggagcgtcctggaagaaacagttaaggtggggccacagaggagggtggacaagcctaggcaacaatattcctcaacagccgaagtttgtgtatttgttttttgagacagagtctcactttgtcactcaggctggagtgcagtgagctgaggtgcgatctcagctcactgcagcctcaacctccctggctcaatcgatcctcccatctcagcctcccaagtaactgggaccacagttgtgtgccaccacgcccagctaatgtatttatttatttatttatttagagacagaatcgctctgtcgcccaggctggagtacaggggtgcaatctcggctcactgcaacctccacctcctgggttcgagtgcttctcctgcctcagcctcctgagtagctgggattacaggtgcaccccaccatgcctggcttatttatttgtttattatttatttatttttgagacagtcttgctctgtcactcaggctggagtgcagtaatgcgatctcagctcactgcaacctcgacctccctggctcaagtgagcctcccatctcagcctcccaagtaactgggaccacaggtgtgcaccaccacgcccggctaatttatttatttgtttatttagagacagagtcttgttctgtcgcccaggctggagtgcagtggtgcaatctcggctcactgcaacctccacttcctgggttcaagtgattctcctgcctcagcctcccgaggagctgggattacaggcacctgccaccacgcccggctaaattttgtaattttagtaga[144 bp omitted]gtgtaccaaacgtcagccgacaggctttccctgcctcatctccctgcaacctcccaaggatcctctaatacccattttacaaatgaggagacaggccacagacagaggccgctgtgaggtgagggaaggaggccacggccatgctggcattggcagcactggtccagctcagacctgtccaggtccccagcaggactgcggtgcgcctggctccttcctctgcgcgctccattcccttgctgcttccttccgggcctccaggcttccctccttttctagggtggcggtggaggaacctatatgggctcctgggtgctggagttcgatctgaaccttcccgctcattctgcgtgaccttgggggcgtgcctggccctcccgtgcctcagtttccccagccgcacctgccggactgtgaggccccgaccccccgccctctctggcccccccgcggctccgggctcaggccgccgctaggtggagcgaggaggccggtggagacgcggtgcggggagacgcgcgctcgggagctgcagaggccggggagcgggcctggcgcgcgggtagagctgcgtggacgcccgcggcccttggcgctcagagctcccgccccgcagccagcgcctctaggaggcccagccggacagtctgcgaggggcgcgctccgggcgcaggaggggcggtgtccggggcgcgtggtttgggtcgtcgggacctggatcccggagcaggcaggctgaggtctgcatggtcagggcggcctcaggtgctggggagccaccctggctggacctagggtcccagcttcacgttcacctcctggagcctcaggtctgggtctgatgccccaacgggaaccccaagccctgcccaccgcccgtcctcacctctgctgccccttcactgccccgaccagtggcttccgccataaccctcttgggagacccatttttcataggaggaaactgaggcacagagcgttttctcggtcacagaacagctggatccctcctgtgtgatgagcacctctgggtcctcctgtgtcgtgaccacacctgtgtccactttctgggtcctgggctgcagaatgtcaccgccccaaataccctctcgtgggtgctgtggttggtttccttggccttgggagggtcctttctactcaggtagggataccgtctgggttccccccctactgcccctgcaaggcagggctggtgatccgtgtgcaccctgggggccgtctcatgtgtggctgcaccttcccacaccacggctgaggagaggatcctacccacaggtgcccctggtgggttcagccggcccctgccgcgggatcctgcttgatttctggtactccaggcctcgccactgtcattcccgctgggcatgatgcgcacctgctgtgccatgctcttgggcagctctctggggtcacggaaacttctgtgcctcagttgcctcctctggaatgtgcaaatccttcgagaaataagctggaagacctgggagcaagcaggcttgggtttccaggtttggggggggggtgcccagatacaaccccaaggctttgggaggtgaggggacaccctgctgctccatctggacccgcgcccgtgagctctgctgctctgcgcctgacccacagctctgtccacttgccccatatggg[138 bp omitted]cgtagtgaaacctcatctctactgaaaatgcaaaaattagccaggtgtgatggtgtgggcctgtaatcccagctactcaggaggctgaggtagaagaattgcttgaacctgagagagggaggttgcattgagccgagatatcgtgccactgcactttagcctgggggatagagtgggagggatcgatccagccctctttcatccccttcccgctcactccgacccaacctcccagttctgtctttaaaacaagctgcttttgtctctgccccagggcctttgcacgggctgctccatccctgcatgtggccagcccagcagctccctcactgcccacctgtggccggctgcatccctccaatcttcagacacccatttttttttctttttcttttctgttttattttttttgagatggtgggggtggtctcggtatgttgcccaggctggtctccaactcctgagctcaagtgatcctcccacctcggtctcccaaagtgctgggatcacaggcatgagccacctcgcctggtcttgacacttattttcatgttcagtttgaccatatttgtgacaagtcagagacgatacagcaaggggaagaagacacgttcccttccctctagaaagtcacagtcacgcacagaaggcagaaggcttgcagtgcacagcgacgggataaaggaaccagctctgcaacagagtgagtggctctgagcttttgatcattgagatataattcacagaccatgaggttcacctgcttaaagcactgagctataactcgcggaccatgaggttcacctgcttaaaggtgtaatccagtggcttttagcgtacttgcagagttgtgcaaacctcacctctctctagttccagaacgttctcatcaccccagaaggaaaccccatccccattagccattgctccccatccccaccccagccctggcacccaggcatcccctctctgcctctgtgggttggcctgtcctggacacttcatagaaatgagatcacagactgggtgtggtggctcacatgcctgtactcccagcactttgggaggccg[132 bp omitted]ggctgaggcagggagaattgcttgaacctgggaggcagaggtttcagtgagccaagattgtgctgctgctgtccagcatgggcaacagagcaagactctgtctcaaaaaaaaaaaagaaaactgaaactcagacagcgaccctcctctgcctcagtcctgcggtggctccatgtgccccaggattaacgcacactccccggcctggcggcacactttgctgggcacggggcgagaccagaagaacccaaagaggccagagggtcccagctcagcgaggagtgggaggtgcttccttctacccagataagagcctgggagagctgggagagtgggaagtggggtcgccccgattttccagggcaggaaaccaaggctggggccttgggctaacacccacgtcaggccccgggtctcgctgcccagaggctccggtgagtgaagctcctggcagcgtgcacctgcgcccgccggacccgcctcccacctgccattcctgccggggagggaagggccactgtgggcggctcagggcccccaccgctgtttccgggctcttggtggggtggggagggccgctgtcagagaccccctgagaccctcgggaacactgcctgcctaatgaggatccctggggcctctgcccagttcgggccggggaataaaggcctcctcttccattccgctgtttctccgccccccgccgtaataggattgagacttttgaagttaataggaaatgaggcaggctcccacgtacagaatgcggacgcggagggcttagagggccctttgtgagcccggccgggcggctccccccgccggccggccgtgatgaaagcaccgtgaaatatacagtggcaggacgccccttgaccctgacaggcctcttaaagaaaagaaggggggaaaatcccccagcagttgtacatgtgcatgtgaacacacgtgtgtgtgtatgcagcgctctggcccggccggccactgggacgctgtctgcacggcgcccacgcggggcctcggctcagcca[131 bp omitted]tcactgcaacctccgcctcccaggttcaagctattctcctgcctcagccttcctgagtagctgggattataggcatgcgccaccatgcccggctaattttgtgtttttagtagagatggggtttctccatgttagtcaggctggtctcgaactcccgacctcagatgatccgcctgcctcggcctcccaaagcgccgggattacaggcatgagccaccgtgcccggcctgtttgttttttttttgagatggagtctctgtcacccaggctggaatgtagtggcgcaatccctgctcactgccacctctgcctcccaggttcaagcgattctcctgcctcagcctcccaagtagagtagctgggattacaggcacctgtcaccatacccagctaattttttttttttgtattttagtagagacggggttttgccatgttggccaggctggtctcgaactcctgacctcaagtgatccacccaccttggcctcccaaagtgctgggattacaggctcgagccactgcgcccagctgagtttggggttttggatgctgggcctgagagtcagaggccattcatcactcagggcagacagccccacccaaggctcggtcttctctactaacacacctccagagacggcaggcttaccacttagcaagactcctagacaaggcttctttgcgtgtggctccagaggaaggtgaagatgacacctttcaatgtcactaaggaaaagtgacaagggacagaagggaaggcaattttttttttttgagacatggtctcactcccattgcccaagctggagttcagtggttctgtatcacctcattgcagcctccacctcctgggctcaagtgatcctcccatctcattttttcatttttttgtagagatagggtctcactacattgcccagactggtctcgaactcctgggcttaagggatcctcccacctcagcctcccaaaatgttgggattacaggcgtgagccaccgctcctgcctcagcctccacagtagctgggattacaggtgcctgccaccatgcccagctaatttttgtatttttggtagagacagggtttcatcatgttggccaggctggtctcaaattcctgacctcaggtgatctgcccgcctcagcctcccaaagtgctgggattacaggtgtgagccactgcgcccggcccaagaaggcaatttctaaaacagctttattgagttattcacatagcatacagttcattcatttaaagtatacaatttttttttctttgtatttttagtaga[244 bp omitted]tgcctcagtctcctgagtagctgggactacaggcgccttccaccacgcctggctattttttttttttttttttttaattagagacagggtttcacggtgttagccaggatggtctcaatctcctgacctcgtgatccacccacctcggtcggcctcccaaagtgctgggattataggtgtgagccaccgtgccctgccttgatttcttttattgtcttcataaagctgtgtgtccatcaacccaatcaactttagaacatttccatcattccaaaaggaaaccccgttccctccccagccctggcacccacacttcccctccctgtctctgtggatctgcctgccctggacatttcatagaaatgggattgcacacctgtggccttctgtgtctggcgtctctcactgagtgtggcgtcctcaggatgcatctgcgctgtggcctgggtcagagcctcgctccttttcacggctcagtcgtgttccagtgggcagagggccatgccgtgtttgcccattcttgtgttgatggacatttgggctgtttcagacgtttctgagtgtgtagggaatgctgttcttgccaactcttccagtggccctggatttgggcctttgaccctcacagaaggccaagcagaggctgggcaggtcccaccaaggccagaagcagagggcgtgttccccagcagggcctggtgtttggagcatgacacatggaaacagcttccaggcatgaccctgtgtctcccagctggccctgccacttctggaggtgaccctgccaccctgtgactctgtttctccgtcggcaaaggcggcggtgatggggactctgtggtggcagctattgtcaggcagcatggcagctgcacacgggggctcgcccatgtgagggaggctttccgcaggtggtccctgtccctgtccctgttcgcatggtcctgcagacggccgtctcacccccataccactggcgttggagggcagattgggcgtgaggagagggtgaatctgtgtccagggctccccagttttccgttcagacccgtggggaggcgactttcccgctgtgggctccagcatcgggaggggtggtctgtgtggagtgacgtgtggccctgtccccgctacgagaaatcccggggaaaggaggggtgaagggggcgggagggggttcctggaatctggctgagcttgggtggcacccaaggatgcctgcagcccgcccagtggcacgggaagccccctcacccgctggctggaaggggtgggaggcaagtggcaggaggcaggtggatgggttgcctgttcttccctgggggcgccaggggaagacctgtccctgccagagcaccgcggctggcagcccccagccctttggtggcagctatgccctggggtgggcagggtgatgcgtaggtcatctgcccctgtggtgggcccagcgccctcctgtcttctcagaccctccagaggaggcaaaggaggtctctcaggcagagcgagaacatgtcattccttcagggacagcagaaccaccacaggtactgcccacctgggtcagacatcagagggacagagacagagagacagagacagtcagagacagagagacaaagggagacagagagagacagacgcaggcagacagagtcagagatggagggaggaagagacggagagacagtgacagagacagaaggagacagagacagagagacagagacagagggagacagagagacagagatgggggagacagacaaaaacagagagacaaagacagagacagagggaaacagagagagggagagacagaaatagagataaacagagacagagagggaaggagacagagaaagagacagagagacagagggagacagagatagatcgagtcggacagagacagagaaagagacacagagagacagagggatacagagatacagcaagtcggagagagacagagagacatggggagacagaggcagcgcaggggcggctgtgcagggcgatgggccgagggctccatcccggccttcctggcccctgggccccccgcctcccagctgtgactggcctgctctggccttgggctccgcctgacttttctgggtttggggttgagggtgcaggaggccctggcagggcaggactctgggtccccaggggccgcctcaccatcctgcccccggggtcacagaacttgggcatctccccatcagtgggcgacacgggcccagcagggactcgggaaggggctggggcaccctgggctctgctcagcccgtgtcccaggagcttggcaaggggcgcacagccagcccacagctaactgctgaggggaaccctcctctcccaggtgccagcccaggtgggggcagggagcctcaggccctaccctcgggtgctcacagcgtctcctggacttagcagaggtcggtgaggcccgaggaagcttcatgctggggtctcggtgcaggaggtggaggggggatgggaaaaggcttgaagggagggcccggatccatcaatggacactgaggctgcttggtgtctcctggaagatctgttcacatcctggcccct[145 bp omitted]aaccccgtctctatgaaaaatacaaaaacaaaattagccgggcgtggtggcggcaggcgcctgtagtcccagctactcgggaggctgaggcaggagaatggtgtgaacccggaaggcggcgcttgcagtgagccgagatcgcgccaccgcactccaacctgggcgacacagcgacactccgtctcaaaaaaaaaaaaaaaaaaatagggccttggcagatgtgaccgagttatgacgaggtcgttcgagtgggcctggcgcagcgtgactggcatccatataaaatacacatgcattgattgggcactggtgaaagggaactacctcagtccccacctcaggatgtcgcataaccggtgtttatggcaccaaaaacttcatctctgtaaaccacttggaggggtgtctggcaccaagtccatgtccatgagtgtctgaaaatagcataaaaataaaatagaaaaaaagaaagagctggtgcctaccctcggggagcctacaggacgtgagcttgaaagagctggttatctccccgtctctctgtctctctctgtcttggaaatgtctaagggggcaggcaggagggcttcctggaggaggggtcctttgagctgagttcagaagggcgagaaggagccaggtttctcatggagcagccaatgcaaagggctgggggccacctggagcctggtgtgtccttcgggcagctggtgtggctggagcaggggatgccaagcctgctgagggcttcatgggccgcagggaggagtttggtttttctcctgagggcactggggagccacagcagagtttagagcagaagaaggacacaatttgtgccctgtgcccgtggtgagcggcgagcagggagggctgcctggaggcgggtaaggacctcagagcggaattctgccacagtgaagctttggaggaaatctttcttccttttctcttcttttcccatcacgggttgagaaattggagggaggggcattgctggggcttcctgtgcccgcgtgtgcggggggttctggggcctgctgcctgcctgagccagccccttttcccgccagaggcctctcgtcagtccccgggggggcccagtggtgaccttgggcctcggggaacatccagacctgggtcagtggcctcggcaagtgcccgggggatccgccctccggtccccgtgccagtttccacagcgggacaggggggtcccgggggccgggagtccgcagccccgaagacctacgctgccgccagccacacccctgggggtccgaccctcctgggtcccactttacagatggaggaactgaggcggtgactctaatcttcgcccggcctgagtcgcggggctggaacccgcagcgtttgccgattcccagggcccgagcgctccggcgagtgtgtgtgtaacgccctctccctggacgcctcgagtttaggaaacggcggagccgcccggattgaaattctcggcccgtgcacgcccggcggagaaatccatgacgcattgtttagacagacgcctttaaaccgcgccgcggcggggggcggcggccgggggcgcctgcgcggggaaggtcaccctttttttctgcacaaaggtcagccgtagaccgttgccaagacaacggccggcgtaaagatggaggcttaaggagaacagacagttcccctcccgaagatgccccgtgcaaagggcccggccgtgggcttgggaggctcagggggtgtgaggagctgagcgccggagcagagagagcggagagtggggcgctgggatggctctgggaggccaggaaggaatgcgggggcctggggggcagatcttggctcaggccctgccaggctgtcttcaaaccaatgagcctcagggttcctggctgtgaaatgggaacaacgtctgcccttcagggtaggcatctccaggctggtctggtgtgggaaccgctgtgttaaacatgcagactccagccaggcgccgtggctcacaccaacggggcacagtggctcacaccaacagggcacagtagctcacacccgccgggcacggtggttcacaccagccgggcacggtggctcacacccgccgggcacagtggttcacgccagccaggcacagtggctcaaacccgctgggcacagtggctcacaccaacggggcacagtggctcacacccgccgggcacggtggttcacaccagccgggcacggtggctcacaccagccgggcacagtggctcacacccgccgggcacagtggttcacaccagccgggcacagtggctcaaacccgctgggcacagtggctcacaccaacagggcacagtggcccacgccagccgggcacggtggctcacgctaacagggcagagtggttcacgctagccgggcatggtggcagtatgccagccgggtacagtggctcacgcttgtcatctcagcactttggtgtttgtttgtttgtttgtttttgagatagtctcactctgtcgcccaggctggactgtagtgacaagatctgggctcattgcaacctccgcctcccgggttcaagcgattctactgcctcagcctcccaagtagctgggactacaggcatgtgccatcacgcctagctaattttttgtacttttagtagagacgcggttgcaccattttggccaggctggtcttgaactcctgacctcgttatccacccgcctcggcctcccgaagtgctgggattacaagtgtgagccaccgcgcccagcctcatctcagcactttaggaggctgaggcgggaggactgcttgagtccaggagtttaagacgagctgggcaacatagtgcaatcctgtctttattttaaaaaatacaaaaaaattagctgtgcatggtggtgtgcatgtgcagtccagtcccacgtactcaagaggctgaggtgggaggatcttgggagcccaggaggtcacagctgcagtgagccatgattatgtcactgcactccagcctgggtgacagagcaagaccctgtctcaaaaaggcagattcggccgggtgcggtggctcacgcctggaatcccagcacttcgggaggccgaggtgggcggatcaccaggtcaggagatcgagaccatcctggctaacacggtgaaaccccgtctctactaaaaataaaaaaatcagccgggcgtggtggtgggcgcctgtagtcccagctacttgggaggctgagacaggagaatggcgtgaacccgggaggtggagcttgcagcgagccgagattctgccactgcactccagcctgggtgacagagcgagactccgtctcaaaaaaaaaaaaaaaaaatgctgattcataggccctccagggggctcgggctccagaaaggctgggggtcttggtcagcatcctaggtgtcccctgatcaccgccagaggtcccatgagtgtgagctgggactccgaggaggcttggtttctcctacccccttccccgagctggagccggaagcccagtggcccctctgggccggaagcagactggaggctcagatttgcaaacctgagaacagaggtcccgggagcaatgaggtgggcctgagaccctcgctcagaggtggctgcttctcgatctgcaggatctgagggccttggcggccagcagggacgtggccaggagctggcctcggctttggggactcaaggtctttgctgtcatagctttttggtagctacataaaaatggtgctgttcacacaaaccaatctccctggaggtgcttttaaggactgatgagagccacacgccctgattaccatttcatttaccggcgaacctgccttacctttgcgacagagaggacatcaggaaggtgacttttattgaggtgaaattcacacgatgcaaaagtaaccattttaaagtaaacttaatgacctgcgtcagcctcactcccattccctgccccagccctgacgctacgcaaccactttcttcttttatttatttatttatttattttttgagacagagtctttctctgtaacccaggctggagtgcagtggcacgatctcagctcactgcaacctccaccttccggattcaagcaattctcctgcctcagcctcccgagtagctgggactacaggtgcccgccaccacacccggctattttgtatctttagtagagacggggtttcaccgtgttggccaggctggtctccaacgcctgacctcaagttatccacccaccttggcctcctgaagtgttgagattacaggcgtgagccacctcacccagccgagcagtttttaatttttggaaaatgtgtacctccactgtgagaggcgtctgtgtgtgcgtgttgtggtttgagtgccctgaattagttaaaggcactccttcttctctgcggttccctgcagacctgaccgtctgtgattctgcagatgtcagggctgtacagaagagggtggaggccgggccagccccagctcctgctcacacagggaattagtgtcagagctgggctggggtcgagaggtgggctgctgggacatccgccctttcacccccatgctgactccaacatcagattgctgtcagcctggctgtccgaaaaagaacggacctggggccgggcgcagtggctcacgcctgtaatcccagctactcaaaaggctgaggcagaagaatcgcttgaaccagggaggcggaggttgcagtgagccgacatcgtgccactgcattccagccggggtgacagagtgagaccccatctcaaaaaagaaaaagaaaaaaaaaaagggccgggcgcagtggctcatgcctgtaatcccagcactttgggaggccaagaccggctgatcacgaggtcaggagatcgaggccatcctggctaacacagtaaaacctcgtccctactaaaaataaaaaaaattagccaggcgtggtcgagggcacctgtagtcccagctactcgggaggctgaggcagaatggtgtgaacccaggaggcggagcttgcagtgagccgagatcgtgccactgcactctagcctgggcgacagagcgagactccgtctcaaaacaaacaaacaaacaaacaaaaagactgggcacggtggctcaggcctgtaatcccagcactttgggaggccaaggctggcagatcacctgaggtcaggagtttgagaccagcctggccaacccaattttttttctctactgaaaaaaaaaaaaaaaaaaatatatatatatatatataggaggctgaggcaggagaatcgcttgaatcaggaggcagaggttgtagtgagccgagattgtgccactgcactccatcgtgggcaagagagggagactctgtctcaaaaaaaacaaacctagaaaaattagctgggcatggtggtgggcacctgtaatcccagctacttgggaggc[136 bp omitted]ttctcgccaattaggacaggacatcgggaacctagaaaatttgaccaacacggaaaagcaccccaaaccaaaccacacagcaacagcaaaactcagactcttagcacctccacccagaaccagtactgtttatacgattccagtcacgacccggcatgtgtcgggtgtggacgcatacgcatgcacctgcttttctcaaagagtgatgttttagctgctaatttgtacctatttatcacttaacactgcattaatatcactgctcttttcccatgtaaactagtcttctgggacagaatttgtttttatttttattacaaaaattttttttgagacagaggctctatcgtccaggctggaatgcagtggcatgatcgcatctcactgcaacctctgtctcccaggttcaaacgattctcctacctcagcctcccgagtagctgggattacaggtgcataccacccccccactaatttttgtacatttactagagacaaggtttcaccatgttggacaggctggtctcgaactcctgacctcaggtgatccacgcaccttggcctcccaaagggctgggattacaggcatgaactaccgtgcccagccttatttttactttcagagatgggagtctcactgtgttgcccaggttggcctcaaactcccgggctcaagtgatcctcctgcctcggcttcccaaagtgctgggattacaggcgtgagtcactgcgcccggccctgaagtttttttttttttttttttttgagacggagtcttgctcttttgcccaggctggagtgcagtggtgcgatctcggctcactgcaagctccacctcctgggtttacgccattctcctgcctcagcctcccgagtagctgggactacaggcgtccgccaccgtgcccagctaa[143 bp omitted]tttttaatctttggcttctcgcaaggtgctgcttccttttaccttctagaatgttctccgccacaaaaaagattaaagtctccaacaacaaaacaaaacaaaaaacacttccaaactgcaactcattgagagatggcagaggcttgtttcagattccagttgggaaggggaggtagggtgggtgcttctccgagaaagcccctggtgtgggggaggtgggctgaggttggagagggggtacccacagcggccaggtgggaagaagcctgcctgggagccgaggtctccacgtggccgccatggactgggggtcactctgcgcctgagatgtcttcagagactccagctataaaaagctgtgtggggctgggcgtggtggctcacagccacctgtaatcctggaactttgggaggctgaggtgggcggatcatgaggtcaggagtttgagaccatcctggccaacatgctgaaaccctttctctactaaaaatacaaaaaatagccgggcacggtggctcacgcctgtaatcccagccctttgggaggccgagatgggcagatcacctgaggtcaggagttcgggaccagcctgaccaacatggaaaaaccccgtctctactaaaaatacaaaattggccgggtgcggtggctcacacctgtaatcccagcactttgggaggctgaggtgggcggatcacgaggtcaggagttcgagaccatcctcgccaacatggtgaaaccctgtctctacaaaaaatacaaaaaatggctgggcgcagtg[131 bp omitted]gtggtgggcagctgtagtcccagctactcgggagcctgagg[134 bp omitted]cctccggggcacgctgggcctccggagtctggagtgggggctaggggctgcctggggaggggctggaagggaagcagcagacaatgggctgggctgcacccctcccccggttccagttccccccaaatcagacggacacggctgcagaaagctgcggcctctcacgcggccaggcgcggggcgcacaatgcttgctgtcgtcccgtgttttctgctgtccccgcctccgttgtctgggtcccctggggcagctgtggaaattgggggttgagagcccttccaggcaggctatctttgtggctgtttcaagcatcctttgggagacagtaggggacaccttcccttccgccctctggacgaggcaggggtgacagcgtcggtgcgtgtactgggctctcgggaaggaggagggggcccggctcctggtcccttgtcccttgtccctgctcagtcctggttgcaggcattgtgggcaccacccgtgctgcccacaggaagatcattgtccgtagcagcatcctgagctgtgacctgcgtttatttccccatggggacgtggggtctccctgatgtcaagagaggcggtgtcacacaggcatttaacatgccactgccatgattgggactgggattgggaccagcacagccccttgggggatgtggcggtgtggtgggagaggggcttgggaacccaccagcagcctagccctggaagctgcgtgttgtagattatggaaaatgctgcagcactcagaacgagacatctgaaaatggtgttgaaagaaaacaaggacctgtcacttctgtgaatgtccccagcaaggactctcaggctatgatgagttggtttttttttttttttttttttttgagatggaatcttgctctgtcgccgtggctggagtgcagtggtgcaatctcggctcatcgcaacctctgcctctcgggttcaagtgattctcccacctcatcctcctgagtagctggaattacaggcacctgccaccacgcccagctaatttttatatttttagtagaaacagggtttcaccatc[137 bp omitted]ttttattatttatttatttattattattttttttttagatggagtctcactctgtcacccaggccggaatgcagtggcacgatcttggctcactgcaacctccaacttctaggttcaagtgattctcctgcctc[133 bp omitted]cagcctcccaaagtgctgggattacaggtgtgagccaccacgcccagcctcaaaaaaaaatttttcaaattaaatttaaaaaaaaacaaacccagtctgggcacggtggctcacacctataatcctagtagtttgggaagctgaggcaggtggatcacttgaggtcaggagtttgagaccagcctgggcaacacagaaaaaccccatctctacaaaaaagaaaacatgagctgggtgtgatggtccacgcctctaatcccagctacttggtaggctgacgtgggaggatcacttgagcccaggaggttgaggctgcagtgagccatgattttgccactgcactccagcctaggcaacggagcaagactctgcctgaaaaaaaaaaaggatttgtctgtgtctacgcgcgtgtgtgttttgctcttgttgcccaggctggagtgcagtggcgcaatctcggctcactgcaacctccggctcccaagttcaagtgattttcctgcctcagcctcctgagtagctgggattacagacatgcgccaccacgcccggtaatttttgtatttttagtacagacagggtttctccatgttggccagggtggtctggaactcccaacctcaggtgatccgcccacctcggcctcccaaagtgttgggattacaggggcatgagccacggtgcccagccacatttatgtatttattaaataaaatagctgggcaccgtggctcgtgcctgtaatcccggcactttgggaggcccagatcagcagcgctttgcacgttgtgcctgttggcctcggtttccccggtaaaacttgtgatggttgcatgaagcccagatccatgaataaaacacgaggtctggagttagtgcttcctctcctacagcgaatgcataatcagcccacaactgcggcgacgaggcgtccgaggcggccgcaccccagcagcgatcggtgattcatggctcgatctgctaattgcctctcgggccggcttcgggctgatgcgtttgacaaggcgaggaggctgagacgtgcattaggcactcagccgcccccgccgcccatggagggcgcgactgctgctccctcttgggggtgatccgtcatttcatccacgggggagttggggacctggggggcaagagagaggctggatgcctgggccctgtttgtaaacagcgttgatttctgagctgagatgtggcgaccaggcccggagcagggctgtattcacagtcgtcgaggggtctgccggccgtggccctgctatggaaccttgggtggggctggggaacaggacc[174 bp omitted]gtggcgggcgcctgtagtcccagctactctggaggctgaggcaggagaatggcgtgaacccgggaggcggagcttgcagtgagccgagatcacgccactgcactccagcctgggggacagagcgagactccgtctcaaaaaaaaacaacaacaaaaaaagacaggccctcctgccaaggagaacgccagctgccggccgcagtcatttgtctgtcacttggatgcatgcagagcggggtctccggagggtggctggtgccggaacctgctgccacttacagggccctggtccccgtggatgctccagcttctccttagagctcccggctaagatggacccgcaagtgtgttttgttgttgttgctatttttggagacggagtttcactctgtcgcccaggatggagtgcggtggcgtgatcttggcccactgcaacctccatctcccgggttcaagcaattctcctgcctcagcgacctgagtagctgggattacaggcatgcgccgccaccgcacccagctaatttttgtattttttaatagagacggggtttcacctgttggccaggctggtctgaaactcctgacctcaggtgatctgcctgccttggcctcccaaagtgctgggattacaggcataatttttgtattttttagtagagatggggtttcaccatgttggccaggctggtctcgaactcctgacctcaggtgatctgcctgccttggcctcccaaagtgctgagattacaggcataatttttgtattttttagtagagatggggtttcaccatgttggccaggctggtctcgaactcctgacctcaggtgatgtgccagcctcggcctcccacactgttaggatcgcaggtggatcgcagagtcttgctctgttgctcaggctggagtgcagtggcaaaatcatggcttactgagccaccgcgcccggcttgtcccgtattcttattgctacgtccggcagcgctgtctggacaggcctaggacctgctatctccttgggtcaggctcaggcctctttgtccacttctgagctcctcctggcacgtactctgtggaatgaagcctggagcagctctaatttttttttttttttttttttttgagacggagtcttgctctgtcacccaggctggagttcagtggcgcagtctcagctcactgcaagctccgcctcccaggttcacgccattctcctgcctcagcctcccgagtagctgggattacaggcacccgccaccacacctggctaattttttgtatttttttagtagagacggggtttcaccatgttagccaggatggtctcaatctcctgatctcgtgatccaccctcctcggcctcccaaagtgctgggattataggcgtgtgccaccgcacccggccctggagcagctcttgaggtgtgttggccccttgggcccactggccctgggtcaccttgggtgtccacccacagtggtgcagcaggaggccattctcagcaagacccgctctcatcccagcgtcgctcaacagctgctgagaacgccctctgctcccggtgggagaaggggctggtggcacctgaggaccctggcccgagggagccctggagatgctgtgggttcccacatctagggatgctggtaaagctttgcacaggcctggcaaggaggaagcggactcctcaccctgccgggcactaggcaggtccccaaatagcatcagagaaacctgcttccccaaacgaacactgagtgaagccgtcatttgcccggaggtgaaaatgtaaatggtttcaaaatagatttggggccagcgtgggcgacagacacagacaggcacacacatgggctacccgggctggggtgcgatgacgccgttgcccctggttacagaaaggcaaccccccagctcagcacaggccgggggccaccacccaaacacggtcaccagcagcggcaggagggaagcaaggagaccaccttttcccggggccaggagaccaggtcatgcctccaaaggctccagcttgggctacctgtgccattagcgagtgcctctcagctgccccccgggagtcagcaggctgactgccccacggcggaggaatggcggggctgtttaaagcactctgtggaacttttcttcttcttcctattattatttatttattttatttttcagatgaagtctcgctccgtcgcccagaccggagtgcagtggcgggatcttggctcactgcaacctccacctcctgggttcgagcaattctcctgcttcagcctcccaagtagctgggattacaggcgcgcgccaccacacccatctaatttttgtgtttttagtagagacgggtttcaccatgttggccaggctggtctcgaactcctgacgtcaagtgatccgcccacctcggcctcccaaagtgctgggagtacaggcgtgagacaccggacctggcccttcttctttctattattaatagactttatcttatttttattatttatttattattttccttttctttttgagacagggtctcactctgtcacccaggctggagtacagtagaacaatcttggctcactgcaacctcgacctcctggggctcaagtgatcctccagtctcagcctcccgagtagctgggattacaggcgcctgacaccacacctggctaatttttgtgtttttagtagagatggggtttcgccatgttggccaggctagtctcgaactcctgagctcaggcgatccacccacctcggcctcccaaagtgctgggattccaggcatgcactattatgactggttactttgactttttcttaaaaatggggtctcaccatattgcccaggctagactcaaattcctgggcttgaccgtggttggtgactttcgcctttaatgtgaacactttgggaggcagaggtgggaagagtgcttgaggccaggagttcaagaacagcctgggtaacattgtgagaccccccatctcaatttttattaaaaagaaggaaaacaaaaaaattaaaaaactcctaggctcaagtgatcctcctgcctcggcctccctggtagaatagattttttaaacaatttttgggccaggcaccgtggctcacgcctgtaatcccaacactttgggaagctgaggcgggtggatcacctgaggtcaggagcttgagaccagcctggccgacatggtgaaatcccgtctccactaaaaatacaaaaattagctgtgcgtggtggtgcatgcctgtagtcccagctattcaggaggctgaggcagcagaatcacttgaacccaggaggcgcagattgcagtgagccgagatcgcgccattgcactccagcctgggcaacagagcgagacagggcctcactctgtcccccaggctagagtgcggtggcacgatctcggctcactacagcctcgactccggcctccgtctcctgagtagctgggactacaggcgcccaccaccatggccagctaattttttccattttttaaggagccaagtctcactatgttgcctgggctgagcccgaactccggggctcaagcaatccgcccacttcagcctcccaaagtgctgggattacaggtgtgagccaccaccccagccggtttctcccttttagaaaatttaccactaggagccaaaatattttttcccaagctcgttagccctttgacttctgttaccatcctcctcatcttttccgaacgaccacttctcttgtcatgagctgacacagctctctgggatggggttattaagccctttccagcaaaaactgcaagtatgtttcccagctgggagggtgctaaggcatgtgttactctggtcctgctcctgtgatacattgtctcccaactccggagaaggaggtcagggtttcagttcctgggtctgtttctagggatgccaggtgggagtatggttttagaaaagcaacttggggccgggtgcggtggcccacacctgtaatcccagcattttgggaggctgaggagggtggatcacctgaggtcaggagttcaagaccagcctggccaacatagtaaaaccccgtctctactaaaaatacaaatattagctgggcgtggtggtgggcacctgaagtcccaagtactcgggacgctgagacaggagaatcacttgaacccaggaggttcatcccaggaggttacagagctcagatcgtgccactgcactccagcctgggcaacagagcgagactctgtctcaaaaaagctgggtgcggtggctcacacctgtaatccgagcactttggcaggctgaggccggcagatcacgagatcaggagttcaagaccagcctggccaacatggtgaaaccatgtctctactaaaaatgcaaaaattagtggggcgtggtggtgggtgcctgtaatcccaactactcaggaggctgaggcaggagaatcgcttgaacccaggaggcggaggttgcagtgagccatgatcatgccattgcactccagcctgggtgacagagcaagactccatctcaaaaaaaaaaaaaaaaaagcaaagatggggaaaattggggacgtcgcctatcccgacccctgtgcctgacacgcagcccgtcacagggcgtgggaagcacggggcagttgcggggaccgccgtgttctcagccacccacccagggcccccagcatctctccagcgtctcctccatttgagttcaaacatgggccctttctacaatcagctttgtttgtgtggtgtttggaattgccatcctggaggccctgggtactgttgtgattcctaggctggtttcctggggctccgtgtggtgggggcctctggccaagctgctgtaacaaagaccacaaacctggtagcttgcaacggcacacagtcaccatctcacagtctgcagggcaaggtctcgctctgtcacccagacttgggtgcagtggtacagtcgtggctcactgcagcctccaccccctgggctgaagtgatcctcccacctcagcctcccagagtgccaggaccacaggtgtgagccaccaccatggctggcccaaatcaccccttatttatttatttatttatttaggagacggagtcttgctctgccacccaagctagagtgcagtggtgcaatctgggctcactgctacctccgctccccaggttcaagcaattctactgcctcagcctcccgagtagctgggattataggtgcccaccaccacgcctaactttagtatttttagtagaaatgtggtttcacatgttggccaggctggtctcaaactcctgacctcaggtgatccgcccaccttggcctcccaaagtgctggcattacaggtatgagccaccacgcccggccaaatttcccatctttataaagaaaccaggcatattggatcaggatccactgtactcccgaatgacctcgtgttaactgattacatctgcagagaccctatttccaggtaaggtcctggggttacaactgcagtctgtggatgatttgtgggggacgtggttccaccctagtgcctgccacctgccatctctctgggggtttgatgcccttggggtgcctggcacctcactctcagctgctgccaaagcccttcttgagctcgtcaaggtcaccctggattctaatcccaacccccaggcacttcttggcaccaggaacattttctgcaggtggcctgcgaaggagctgggagctgtgctcaaatgcttcctcctaacaagccttccgtcctggggactggcactgtgttgagacgggagagactccaggtccgcagagggcaccgtcctgcctggaggttcaggactgccaccattcatctccgtgaggagctggagcaggcgtcctgcctttctgtgtcctctaccctggttttgaatagaaggcatcctggctgggcagggttcttcagggagcaggtgatccggcattcagccagattcttgaaaaccccctgggccgggcacggtggctcccgcctgtcatcccaatactttgggaggctgaggcggggagatcacctgaggtcaggagttcgagaccagcctggccactgtggtgaaaccccgtctctggtaaaaatacaaaaattagccgggcatggtggtgcgtgcctgtaatctaagatactctggaggctgaggcaggagaatcgcttgaactgggaggcagaggttgcagtgagccaagatcgtgccactacactccagcctgggcgacagagcgaaactctgtctcaaaaacaaaaacaaggaaaacactccagcccccacaccagcacggggactgcagcgcccgcgagacttgggtcacggtgactcctggaggctttgcacgttaagccgccgcctgcccagggacactgtggtcaccttcccccgccggagccctgcgtacctctcctgtctgtgctttgagagaggagtttttttcccgttgcttctggaaccctgggttgtcctgcagaataggacaccctccttcattacgatagaggatgcagagccgctccctggcaggtgttcccagtcccagcaggggtttccagagacacagggtgcggagggattctccaccaggagatggttccagatgcgtaagcccgtcccctctgcaaggccctgtccccaaagagcttgggcctgtgggtcccacagctcctgcgagtgaccaccaccgtccagggccccccaagctgttcactcacgggtctgggtggaggcagacatcctgggaggaaccccaggggtgtggccgaggctgcacagaggcctctccacgcctcctggagggatgggagttagtctcggctggagtggagggtggggaacccagagtcaggagcacccagagtccaggtgggaaacgcctgaggcaggggccctgcttccacccctgctgcaggggacactcagggtcctccacctgggagtggccacgctggtggccctttgcggccctgcacattacagccctgccagctttggggagagctgacatctcaaggaagtcctttttaaaaaattttatttagccgggcgcgggggtgcacgcctgtaatcccggcactttgggaggccgaggtgggcggatcacaaggtcaggagttccagaccatcctggttaacacggtgaaaccccgtctctactaaaaatataaaaaattagctgggcgtggtggcgggcacctgtagtcccagctactcaggaggctgaggcagaatagcatgaacccggaaggtggagcttgcagtgagccgagatcgtgccactgcactccagcctgggctacagagcaagactccatctcaaaaaaaaaaaaaaaaaaaaaaaaaaattatttaatggctcacgcctgtaatcccagctctttgggaggctgaggcaggtggatcacgtggtcaggagatcaagaccatcctggccaacatggtgaaaccccatctctactacaaatacaaaattagctgggcgcggtggtgtgtccctgtagtcccagctactcgggaggctgagacatgagaatcgcttgaacttgggaggcagaggttgcaatgagccaagatcacaccactgcactccagcctgggtgacagagcaagactccaacacacacacacaaaaaatttatttaaaatgttttattaggctttccctatgttgccccggttggtcttgaactcccgggctcaagcaatcctcttgcctcagcctcccaaagccttgggattacaggtgtgagtcactatgcctggcttttgaaacatgttttaaggtattttaaaacttttaattctga[139 bp omitted]cggtgaaaccccttctctactaaaaatgcaaaaattagccaggcatggtggtgggagccagtaatcccccctacttgggaggttgaggcaggagaattgcttcaacccaggaagcagaggctgcagtgagccaagatcgcgccattacactccagcctgtgcaacagagcgagatcctctctgaaaaaaataaaatatgccgggcgcagtggctcacgactgtaatcccagcacttttgagaggccaaggcacgtggattgcctgaggtcaggagttcaagaccatcccggccaacatggtgaaacccagtctctactaaaaatacaaaaaaaattatcctgcgtggtgatgtgggcacctgtaatcctggctactcatgaggctgaggcaggagaatcacttgaacccaggaggcggaggctgcagtgagccaagatcgcaccattgcattccatcctgggcaacaagagggaaactcccatctcaataataataataataaaataagataaaaatgcaaaaatcagccggatgtgctagtgggtgcctgtaatctcagctgcttgggaggctgaggcgggacaattgcttgaacccaggaggcagaggttgcagtgagctgagattgcaccattgcactccagccagggtgacagagcaagactccatctaaaaaaaaaaaaaaaaggagctctcaagccaggaaaagacatggagaaactgtaaatgcatgtgaccacgtgaaacaagtccgtctgaaaagcctccgtgctgcaggattccagctttaggacgttctggaaaaaggctaaactacagaaacagtaaaaagatcagaggctgccaggggccggcagagggagggatgaacaggcagagcacaggatttctagggcagtgaagctattcgatctgag[138 bp omitted]atggtgaaatcccatctctactgaaaatacaaaaaaaaaattagccgggtatagtggtggtcacctgtagtcccagctacctggggggctgagggaggagaatcacttgaacccaagaggtagaggctgcagtgaccgacatcgcaccactgcactccagcctggccgac[133 bp omitted]catcatgctgaaactcgtctctactaaaaatacaaaattagctggaagtgctgtcaggcacctgtaatcccagctactcgggaggcggaggcaggagaattgcttgaactcaggaggtggaggttgcattgagccaagattgcaccactgcactccagcctgggtgccagagtgagaccccatctccaaaagaaaagaaaaaaataattattttttttctgggtgtggaggtgtgcacctgtggtcccagctactcgggaggctgaggtgggaggatcgcttgagcccagaaggtcaaggctgcagtgagctgtgatcatgccaccacactccagcctgagccacagacagagtgagaccctgtctcaaaataaataaataaaataaaaataaataaagttccctcaaatccactttgcaatggacgcatttagagtgtcatgtttgcacaaatgtggtcacctgccacagtgggcgagatgaagaccacagccaatataattacggtacagacaattgtgaaagcaaaaagagggggaaggaagcccaggtttgatttctagctggggtccaaccctgaagtgggtgaggtaaagccagatcctgtgcacacactgctatgggcgctgctgggccttcttcctggagtttttgtcggcctggagtgggagccaaggctcttggggacttaaaaaggcaagatccagctgggcatgatggctcacgcctataatcccatcactttgtgaagctgaggcagggggatcacctgaggtcaggagatcgagaccagcctggccaacatggtgaaatcccatctctactaaaaatataaatgttagccatgcatggtggcgggtgctgataatcccaggtactcgggaggctgaggcaggagaatcgcttgaacctgggagtcggaggttgcggtgagcggagatcacatcactgcactccagcctgggcgacagagtgagactccgtctcaaaaaaaaaaaaaaaaaaaaaaaaccctgcaagatctgcatttgaggtcagagtgtctgggggtagaaactgaaacagagttgggggtgaccctgagacagggtctgggttctctgtggcaggtgcagcagtcacccagtctcaggggggagatgggaggatggggaggttgtctgcgaattgcaggctgtgtctgcgtgcgagagtttcagacaaagaaggaagttattggctgagaacaatgtaagattatatgatgtaggaccttgaagaaaacaaataaaagacagttgtagattacccacgtctgggagaagaacaaggaaagagaaagaagagagaaaacaaatcctcaaatggcagcgctttttttttttttgaaatggagatgacaccttacagcctgccctgaaatgcctaacagctaaaatgaaaggctttttttttttttttgagacggattctcactctgttgcccaggctggagtgcaatggtgcgatctcagctcactgtgacctccgcctcccaggttcaagcgattctcctgcctcagcctcccaagtagctgggattacaggcatgtgccaccatgcctggctaattttttgtgtttttagtagagacggagtttctccat[136 bp omitted]gagacagagtctccttcttgttgcccaggctagagtgcaatggcaccgtcttggctcactgcaacctccgcctcctgggttcaaacaattctcctgtctcagcctcccgagtagctgggactacaggcacatgtcaccatgcctggctaatttttgtatttttggtagagacagggtttcatcacgttggccaggctggtctcgaatccctgatctcaggtgatctgcctgtctcagcctcacaaagggctgggattacaggcatgagcaatgatgcctggccctcactgctaaattaaaaaaattttttggagagacagggcctggctatgttgcccaggctggtctcaaactcctgggctcaagcgatcctcccgcctcagcctcccaagtagtttgggattacaggtgtgtgccaccatgcccagctaattttttttttttttttttttttgagagagtctcacgctgtcacccaggttgcagcccagtatcgtgatctcggctcactgaaacctccacctccctggttcaagtgattttcctgcctcagcctcccgagtagctgggactacaggcatgcaccaccgcacccagctaatttttgtattttagtagagacggggtttcaccatgttagtcagacgggtctcgaactcctgacctcagatgatctgcctgcctcagcctccc[136 bp omitted]tgggttcacgctttctccttcctcagcctccccagtagctgggactacaggtgcgcagcaccacgccctgctaattctttgtgtttttagtagagacggggtttcaccgtgttagccaggatggtctggatctcctgaccttgtgatccgcccacctcggcctcccaaagtgctgagattacaggcttgagccacagtgcccggcctcgctaatgttttaatgttttctagagacgggtctctggtcatgtggcccaagctggtgtcaaactcctggcctcaaaagctcctcccacctctgcccccgagagcactgggattacaggcatgagctactgtgcacagctctaatctcttcttttataacgacaccagtcacaatggattagagcccagacatatgacattttaccttaatctcctcttttttttttttttttgtttttgttttttgagatggagtttcgctctttttgcccaggctggagtgcaatggtgtgatctcggctcactgcaacctctgcctcccgggttcaagcgattctcctgcctcagcttcccgagtggttgggattataggcatgcaccaccacgcccagctaattttttgtatctttagtagagacgggatttcaccacg[136 bp omitted]gggaggcctcacaatcatggcagaaggtgaaagacccatctcacatggcagcaggcaagagaagggagcttgtgcagggaaacttggaggctgaggcaggtgggtcacttgaggccaggagtttgagaccagcctgtccaacatggtgaaaccctggctgtactaaaaatacaaaaaattagccaggtgtggtggcggatgcctgtaatcccagctacttgggaggctgaggcaggagaatcacttgaacccaggtggcagaggttgcagcgagccgagattgcaccaccacactgtagtctgggggacagagcgagactctgtctcaaaaataaaatataaccatcagctcttgtgagagttattcactatcaagagaacagcacgggaaagacctgttcccatgattcactcgcctcccacaaggtccctcccacaacacggaatcgtgggagctacaagatgaggtttgggccgggcgcggtggctcatgcctgtaatcccagcactttgggaggccaaggccggcagatcacgaggtcagaagatcaagaccatcctggctaacgtggtgaaaccctgtctctactaaacatacaaaaaaaaaaaaaaaaaattagccgggcgtggtggcgggcgcctgtagtcccagctactcaggaggctgaggcaggagaatggtgtgaacccgggaggcggagcttgcagtgagctgagatcccgccactgcactccagcctgggcgaaggagcgagactcggtctcaaaaaaaaaaaaaaaaaaaaggtgaggtttggatggggacacagagccagactctatcaaaggtcttaaaattcttttcacttgggtttgtttgtttcacaataacagaagtaatacaagccccaggtaagcagtcaaacaaagctaagaaacaggatggaaaagacactgatcctgtccttattccaggacggccccaggctcctcaacgcctcccacccgtgttggtagagacagggtttcaccatgttggccaggctggtctcaaactcctggcctcaagtgatccacctgcctcagcctctgaaagtgctgggattagaggtgtgagccaccatgcttggccccaaaatcgccttaatattcatcccttatggggacacagacacatactgcacatctgctgggtgccagccagggtccagcaagtcctgcctgtctctgcctcaattttcttttttctttttttttttttttgagatggaggtttgctcttgttgcccaggctggagtgcaatggcatgatctcggctcactgcaacctccacctcccaagttcaagcgatgattctcccgcctcagcctcctgagtagctgggattacaggcacccaccaccacgcccagctgatttttgtatttttagtagagacagggtttcaccatgttggccaggctggtctcgaactcctgacctcaggcgatccacccgccttggcctcccaaagtgctgggattacaggtgtgagccaccgcgcccagcctctgcctcaattttctttgagtcagtgtctcgctctggcacccaggctggtgtgcagtggcgcaatcatagctcactgcagcctcgaactcctgtattcaaatgatccttatgcctcagcctcctgagtagctgggaccacaggtgcgtgcaccaccacacctggctaattttgttatttttttgtagagatgggggtctcactatgttgcccaggctggtcttgaactcctgagctcaagggatctgcctgcttcagcctcatgagtagctggacatgcatttccatcttgctctgtgttagctgggggaggccagctcctgaaagcccttgcccttcccaaaatgctgggggacgtcctgacccccccatttgtccttcctgtgtctctctggctatctgtctgtgtcttcacctctctgggtccccaccttccacagcccctctccggtgacccccaaactgcagctgtattctcctgcagaggagttcggcggtctctttgtgggtcgtttttatctcatgccctcaggcctccctcacgtgcccctggccctaattaaggtattttcctaaacaagcccagttgcgtctcttaaaatgaattctggtgccagctggtaaaattaatttttttctcatcctctacaatgcaagaatgaatgacacacggtcgcttgtccacaggaggccggcgtcctgcggaaggacaagcgtgtagaccagtaattacgttccagtgtggaaagtgtcccacatgagtgcggcggagcgaggtagccctgaaataaggggcatccccacggtgcagctactagacatggctaaggttgatttcacactcaccctcgctggaccgtgttggatagtgtcagccaaaatatatgtctccctagaacctcagaatgtgaccttccttggaagtagagtctccacagacataattagttaagatgagattgtggcagggctcagtggctcacttctgtaatcccagcactttgggaggttgaggcgggcggatcacctgaggtcaggagtttgagaccagcctggccaacatggcgaaacctcgtctctactaaaaatacaaaaaaattagccgggcgtggtgccgcgtgcctgtagtgccagctactcaggaggctgaggcaggagaatctcttgaacctgggaggcgaaggttgcagtgagccgagatctcactacttcactccagcctgggcgagtgaagtagtgaagaggctgtctcaaaaaaaaaaaaaaaaaaaagataaggttgtattggagaagggtgtgctctaatctaatgagatgtccttataagaggaagaggcatggaccacacactttgggaggtcgaaggtggaggatcgcttgaggtcagaagctcgagaccagcctgggcaacagagcaagactgtgtctctacagaaaatttctttttcttttctttttttttttttttgagacagagtctcagtctgttgcccaggctggagtgcagtggcgtgatcttggctcaccgcaacctctgcctcccaggttcacgccattctcctgcctcagcctccccagtagctgggactaccagcgcctgccaccatgcctggctaatttttttgtatttttagtagaaacgggggtttcaccatgttagtcaggctggtctcaaactcctgacctcaggtgatccaccgcctcagcctcccaaagtgctgggattacagatgtgagccactgtgcccagccacttttcttttttcttttttttttttttgagttgaggtctcattctgctgcccaggctggagtgtagtggcaccatctcggctcgctgcaatctctgcctcctggattcaaacaattctcctgcctcagcctcccaagcagctaggattacaggcacctgccaccacgcctggctaatttttgtatttttagtagagacgaggtttcaccatgttggccaggctggtcttgaactcctgacctcgtgatccgcccaccttggcctcccaaagtgctggaattacaggcgtgagccaccgcacccggctggccttttttttttttttttttttgtagcaacagggtctccctgtatagcccatgcctgagtgcagtggagcgatatcggctcactgcagcctcgaccttctgggctcaagtcatcctggtctccccaagacaatcctgacttccgtggagcccctgggtctccagaaacaccagtgacagccctctctcttgtgttctgaatttcctatgtaaaaacctggcttgtgtgaagggggctggtaattggacatctgtaaagctccttggcagtggggccccgtcaaagctggcagtcgtagctccgtgttaacaaggtcaaggtctggtcaaggtttccagtgtggtccccttatggcctaattagggacttgaatgggttggaacactgattgagtttcagttcagaggctattttgatgttacagttcaatcactttagaaaatatagattcagttctggttcaggctggaacactaggtgtgtgtctgtgtgttttaatctttgatttagttcatggttcagtatcaaacttaatacatttttcacccatcatcagattaacaaagatgagagaaataatcacgcccggccctcgtgcagggtgttagatgggccgtggtaatgcggggctgccgccaatgtgaattggtacctttctgaaaagcaacttgacgtcatctgtcaaacgccttgaggatgtccagaccctcagacccagcaatttccgcctccagggatttatcataaggatataatcagaggtgcaccaagatttacataggagagttgctttctgcggccttatttaaatcatggaaaaatcaggaatcgctgaaatgtctcacaatagcggtctggttaataaaaatacgatagcgaccgttgtcttacaacgccttgagtagcagagggaattgtgtatgatacatttcccgcagaaggggaaacgttttaattaaagccataactgacgtggagccggaagaagcctgtgaaaggacgttcttgcatcgacctgccaggcctttgtgctgccttagaagcagccgctttattgcaactgtgaatctctatggtttaggagagaaattcattctttaaacaaaatttgagtgagcgctcggtgacacggactgggcttacaatggtgaagaaaacaggactcagggaactcacagacgaatggagaagacatttaataaaataagacctaacatttcaccactggcacaagtactttaaaagcattaatttatttaataccagagccagaggccaggcacggtggctcacgcctgtcatcctagcgtttttgggaggtcgaggtgggtggattatgaggtcaggagttcgagaccagcctggccaacatggtgaaaccgtctctactaaaaatacaaaaagtaggcgggtgtggtggcgtgtgcctgtaatcccagctactggggaggctgaggcaggagaatggcttgaacctgggaggtataggttgcagcgagccgagattgcaccagtgcactccagcctgggcaacaagagcaagactctgtctctaaaacaaattaaaaaaatatacctcatttgagctcataggagctttgaactcctgggctcaaggaatcctcccatcttggcctcccaaagtgttgggattacaggcgtgagctgttgccacgctgtgttttgttttgttttgtttttgagacagggtcttgctttgtcatgtggagtgcagtggtgcaatcacggttcactgcagcctcgacctcccagactcacgcaatcctcctgcctcagcctcctgggtagctgggactacaggtgtgcatcaccatgcctggctaattcttttttgtttttgtacaggcagggtctcactatgttgcccaggcctgtctccaactcctgggctcatgtgatcctcccatctcagcctcccaaagcacctcccaaagcacaggcgggagccaccgcactgggccccactcctcctgaggcagaggcttggatctggcacagcaccccttctgctgtattccctgggctgaagcaggtcacacgccagcccaggattttttcttttttctttttgagacagagtcagtcttgctctgtcacccacattggagtacactgacgcgatctcagctcactgcaacctccgcctcctgggttcaagagattttcttgcctcagcctcccaaatagctgggattacaggtgcacactaccacgctcagccaatttttgtatttttagtagcgatgggggtttctctatattggccaggctggtctcgaactcctgacctcaggcgatatgtctgccttgacctcccaaagtgctgggattacaggcctgagccaccgccagctcagatttaacgtgagaggatatcagagacatagttcttgccaaccacccacagaccaccacccccattttatagacaaactgagacggctgagcaaggtggatcctacctgtgatcccagcactttggggagccgaggtgggaggatcacttgagcccaaaaggtcgaaaccagcctggccagcatagcaagaccctctctctacaaaaaataaaaatcttagccagccatggtggtgcgcactgtggtcccagctactccggaggctaaggtggaaggatcatttgagcctgggaggttgaggctgcagtgagctatgactgggccgctgcactccagcctgggccacagagccaaacttcgactcaaaaatgtaaataaaaataaaaaacaagtgaaaggtgaacattctcaacttgataaaggaaaaaaaatcagtcgctgaggttgctgggatcgaccgaagacacaaaccttctattcccgcaaatgtgagaaggaaaaagaagttagagccggctttgctgtcgccccttccccttgaagagtcggggccagtgcgtgacgaatgctgctgtaagtcttttaattttttccttttttgagacgaagtcccactctgttgcccaggctggagtgcagtggcgcgatctccccttactgcaagttccgcctcccgggttcaagcgattctcctgcctcagcctcctgaatagttgggattacaggcatcgccaccacgcccggctaatttttctatttgtagtaaagacggggtttcaccatgttggcaatgctggtctcgatctcctgacctcatgtgatctgcccgcctcggcctcctgctgggattacaggagtgagcctgtatcttttttatagagatggggtctcgccatgttgcccaggctggtctccaatccttgggcttaaaggatctgccaattcggcctcctttgcttttaaagaactgtgggggctggcgaggtggctcaggcctgtaatcccaatactttgggaggccgaggcaggccgatcacctgaggtcaggagcttgagagcagcctgatcaacatttagtattctctactaaaaatacaaaaattagccgggtggggtggcgcgcacctgtaatcccagcaggaggaggctgcagtgagctgagctcgcgccactgcactccagcctgggtgacagagcgagactccgtctgaaaaaaaatcaaaaaccgctcagggaaaggcctgacactgatggagcgaccgctccggggctcccgccacccgcggctgtttccggtgccccccggggtcttgggaccctcccaaggtgggtcctgctctagttcagaagcttatgacgcctttgcggggatgcctggctttgggatcggttgggatctgctggaattgggtccgtggcgcgcagctcccgggctgggaggtgccgtaggacctggaagattctcgaaagttctggaaggttctctcagggatcgccgcgggcgggggagcctgttttcccaccgagacccgcgagggcggtgtccggggtctgactgcaggacaaagggccgggagcgcgggagggcggcgcccgggagcggccacacatgccccgccaaccggtctcctcaggcagcactcccgggaaaaaggggtagacgcgcggcggaaggggcggggccggcgcgcggccgtggacgccggagagggcgaggccggcgctccttgggagcgcgcgcgtcccattgggcagcgggcggaagggggcggagcttggcgccgccgcgaggcaagccccgcccccggccccgcggggagcggcggcggcggcggcggcggcggtggcggaggcggtgagcgcgggcggcgcggacggcagcggttggcgggcgggtcctccgctgttgcggccgctgcggcctccttgcccgggcttggggcgccgcgctggggaaagccgggggcccggtgagcccgcgggatgcgtcccctcggttccgccgggcggggctgaggcgaggaggccgggcctggggggagggggggccccggcctagagactcctccgggagcgcccggtccctaccgccgtgggtcccccactctgcccggacccccttttccgcccctggcgccgtgggcccctcactttgcctggactccttttcccgtccctgccgcccggaccccatctcttgcttggacccgctcccccatccttgctgcctggacccctatctccttccctggatccccctcacgtctgccgtgaaccccatctcttgcctggacccccatctgcttccctggattccccacccccaaccgtgaaatcccccatccctgccacctggaccctccgctccacctcctccgtgagccctcgttcttgctccctgagcccccccgcttctgctgtgacccccttctctgttgcctgaatcccccgttcctgcaagccgcaacccttcctccgccatgaaatcttgtccctgctgcctggacccctacttctgctgctgctgtgatcccctctcttgctggaaacgccacccctacctctgctgggaacctcctcttccctgctgcggggacgcccccctccgttgttgctaaattccacccccacccccaaacctccttttcatttctgtcaacagccaagccagtccttcccattgatgctgtgaacggtctgcagctgtccccgttctttcagggacatggcagccaaaagagcagtcgtttttccgctcttatttttgtgtgtgtgctgtggtcaactgttaactccccaaattggggagggttgtgagctttgattgtgtaaaatgcctctcctgccgaggtcggaggcaggtcttccgcacggagatgatttattcaggagccttttaaaactgatctagatagaacctttgggagggactgtgctgtattttatttatgaaaaaatgcaggcgcctccctggataccgagccccgtcgtttctgtttgtcagtctgctttttggcattgagcatctcaatgcaagattgtggaattaaaccatctacttgaggctaagtcgagctaacctttgcccctgagggctgtgtctgcgttaacatcgccagcaaacagttgtataaaccaccgtgcaaatttcgttccaggacacattggcgtgagacctgggagtacgttgtgccaaatcattgccacttgccacatgagtgtaaatgatggcggatgccaagtatgtcctctgccgatgggaaaagcgattatggcctgcgaaggtgacagccattattctgtaacttcaggacttagaaatgactttcgggtgacaagtaaaatcttgatcaggagatacctaggatttgcttcagtgaaataattgagccagaacacggttggcactgattctcgttccccatttaatggggttttggtctagtgcttccaaggttacacttccagaaatgtcttttttttttcacactaaaaaaaaaaaaagaatcagctgtaaaaaggcatgtaaggctgtaactcaaggaaagatctggcaagcagccctgtgatagtaaattatggtcgtgttcagggaatgctttccagcaattcagtagacagtgctcagctgcaatgcaaaagcccaggtccttgtctttgtctgccactggcctctcatgcctcagtttccccatctgtgaaacaatggggattggaccaaatatctgaaatcccatggttataggccttcaggattacctgctgcatttgtgctaaagtttgccactgtttctcactgtcagctgttgtaataacaaggattttcttttgttttaaatgtaggttttggcccgaaccgcgacttcaacaaaaaataagagaagaaaggaatattttctagctgtgcaaatcctctctctagaggaaaagttaagtgttgtgttgttttaatactgttttttcccgtgtagatttctgatacttcaatcccctactcccccaaaacagttgaagcccagcccactcttaatgggcttattcaccatttgtgtaattcattaatgctcataataacctcatgagaaagcaactagtttgattttatgtcagtttggaagctgaagatccaaacgaggcattctgtgagatctatggagagattggtacaaacactgaatacatgtaaattatactcagggtagaccctatttgtggttaaaatagggatatttccttttttttttttttttttgactgtttcttaatcagtgccatgccaggaaaatagggatgtttccttcccagagatctgtgtgtcttttttcagaaacgtctgtgacaggcccatcaattttgaaatatttggtttttgagcctgtcactctaaaccagcgtttaacgttcaaaaggcaaataactgatgaccaggcggcacattgttctgctccgtgagtgtctggcactgggaaaggtgtagattgtctagaatgacagcaattccgacgccccagtcagtcctgcgtgattgtggcgagggcgcgtctggcaccgggaaggtgtagatcatctagaatgacggcgattccgacgccccggtcagtcctgcgtgattggcgagggtgcatctgtcgtgagaattcccagttctgaagagagcaaggagactgatcccgcgtagtccaaggcattggctcccctgttgctcttccttgtggagctccccctgccccactccctcctgcctgcatcttcagagctgcctctgaagctcgcttggtccctagctcacactttccctgcggctgggaaggtaattgaatactcgagtttaaaaggaaagcacatccttttaaaccaaaacacacctgctgggctgtaaacagcttttagtgacattaccatctactctgaaaatctaacaaaggagtgatttgtgcagttgaaagtaggatttgcttcataaaagtcacaatttgaattcatttttgcttttaaatccagccaaccttttctgtcttaaaaggaaaaaaaaaaaaaaaccattcaccagggttcttgctgcctgtaacctcaggcagatgaattcctagttggctgtgacttttggtttaagtggaaggttgaggaggaaaatgaaaataattcttttgttatctaaaggaaaacatgtttgaaaatgtcttggcggcgttggctggtggtgtgtaacgtcgattttgtctctgcagaattaaggtgaaaagcactgaagttgagatcctagagaagtctcaaattgaagccattgcttcctcgttaggtaagagcgtatttttaagtggccactaggttttcataaaataagaggtcatttgggagaatgtgaaggctcagctttctgggtaaaaattcaccctgttcaccatgtttttcttcatacaagggaacgcgaatcccctgagctgaaggagaaggaaaaatggatccgctttcttaaacctttccagaatttgcccctagaaccactcctattcttgacgcccagaatggtcagtggtgagcatcaaggtcatctcgtacccccgtggcctccagtacacaagacgaggaaggactttgctgccataaggggggaggtcctcctttttcctttcctcttcctatagtaagatttgctgtggtactgtcgctgcctggccagtctggtctcagcccaaggtttgagaagcagttggttgtgtgtttaaaattccagagcagagcccaagggagagaacgggtggcctggcactggggttggtggcacccattgtttgaggcactgtcatggggggcacgaggcaggtcggaagtggagctctcggcttcccatccatccgggtgcgctttctcccaggccttcagtttagcacccacctcctttgcacactgtgggtgagaaaagctttgcctgagtccagccggggactggtcatgcacatacatgacaagtgaggagcactggtgactgcctgccccctagccacagttgtgcaaacccaaacctgccagccttccttctcaaagtggaactgtttatcccatttgcaaataattgtttctcttgtgaaaagatggaccggaattccttccaatgatgtttataaaatcaggtctattttcctgtgtcttccgaaaaacagctcttgtttaaagcaggatccatctctgcataacttaggccgggctgaccatcatcttggatggcgtcgtccttgttggcgcagattgtgttggggggctggttgtttgtgggcgcctttaatattcaaaggggagaatactgttctgattgaggcattatgcccgctgagttgtgatattacatccatcatcttgttcaaataaatagcgccgtatctatatgtcggaatgaataaataaaagtgctgcagcagggaggttgggctggaaaccagaggcccacgatgctctttgctggctttgaaatgcccttgcaaagaagtattgaaaatttaccagcccacaatgagtcttttaaatctccttttccttgctaccaccaacccctgcaccaaccaagaatacgttgccagcagagttctttatttagttggcattggtttttattgaccctgattgaatttgaaattgtaaggctgagagaggatttgcaaaacatttgaatacattttgctcacggtattgttttgtaacttggaggaatttatctttttagccaatcaggttaaggtcaataaatttggtttttaaaaaaatgaagcctcgaatcccggaatgaatagctgtcgttctgtagcctcgtctcctttttgggaaaatgtaggtgagaaatgttagtcctccccttcagtgatttaggtatgaaactagccgtcagaatgagacaagcgagcttctaaagcgatgccgtgaccgcagtgcctgtgcagtgaacgtaaccggcattgtgtatgttcggtccttgcagcctcacagaatgaggttcctgcggcacccctggaagaactggcctacagacggtcgcttcgcgtggctctggacgttctgagcgagggctcgatttggagtcaagaaagctctgcagggacaggtagagctgaccggtctctgcgagggaagcccatggagcatgtctcctcgccctgtgattcgaactcctcatctcttccccgcggagacgtgttgggcagttccagacctcacaggaggaggccatgtgtgcaacaaagcctgtcaagttcgttcacttgtgaaaaggaccccgagtgcaaagtggaccacaagaaggggctcaggaaaagtgaaaacccaagaggcccgttggtcctcccagctggaggtggtgcccaagatgagagtgggtccagaatccaccacaaaaattggactcttgcaagtaagaggggaggaaactcagcgcagaaggctagcttgtgcctgaatggatcttccctttcagaggacgacacggagagagacatggggagcaaaggaggcagctgggcagccccgtccttgccctccggggtcagggaggacgatccctgtgccaacgctgagggacacgaccccggtctgccgttgggcagcctcactgcgcccccagcccctgagccctcggcctgctcagagcctggagaatgccctgcgaaaaagaggccgcgcctggatggcagccaaaggccgcctgccgtgcagctggagcccatggcagcaggggccgcaccatcccccgggccggggccagggcccagagagtctgtgaccccgcgcagcaccgccaggctgggcccgcctccctcccacgcctctgcggatgcaaccagatgtcttccttgcccggattcccagaagctggagaaaggtaaaagtttctcgtggaggaggagagcgcagagggtggagtcctgctcctccgcagccagactgggagccaggcacgtgggtgtttttgaccagattttaatgagatcgttgccaaaatagacttagagcagagacttcctcattcctttttgtctgtctccccactgggctataattgcttcaacttctaaatatttgtcttcttatttttgtttagaagggaagggagttgagtgagtggggagcccgtagaggggcggcgggccacgattgtctgcggcgcggctgggagcattgtggctgtgctgaggccgcagctgcggctgcaccccgaggattaactcttttaacggaagcagtaacgcattcctattaaattgggcagcaatctcaaaagtgattcactcactcaaaagactgactttttaaagaattcctgtgcagatatatttttgtgtggttgcaggcaagcactgtgacttttttccttttaacactgtagcatcctttattttttaaatgctagttcagaaatcttaattaccacatgatcaaatgtctggaaatctacttgctacaaacttaccgcgcagatatttcagtctgtactctgaacttctttcctgaggtcatcatctccttagcacgttggaagcggcagggaactgaggttgccacgctctgaagacaaagtgaccgcacccctaccctgttccatagtcagctcccgtcccggccccctccctgcgtatccgcacctctgtcctgttccatagtcagctcccgtcctggccccctccctgcgtatccgcacccctaccctgttctatagtcagctcctgtcctggccccctccctgcatatccactgattgcttcagatgtgaagggacagccaggccgggacaaaagggattcccacccagggtgcgcgcagcttctgtggccgaggtggctgctgcttacggcccgccttcccttcaccgcaggcctctctccctccctccttccctccttccctccttccctcttgcgtttttctttaaaatgtagtttattagaagcgcactctgtttgaatttggcagtgtggagttgtgtatagcatggaaccttttctttatgcatcgatggtcatgtgtcatgaaatgttttcttgggatgagtcatcaagacaatgcaatgaccatgaaagtctaatatcacattattggcagagtgccagtcttccgaagagtccatggggtctaattccatgcgttctatcctggaggaagacgaggaagacgaggagccaccaagagtccttttataccacggtaagaaatgatcagggggcgccggcagtcctaacggtgcgctcagaggcagcggcggcggggctccgagaccgggccccacattctccatgaaaggtctcctgcgagttcatttctctcccactgaaccgagacctggaagggaccttcagaagtgtcacgttttcagtcctctatcttaagaataacctacacaaagggacgagagactcctgggaagagacggcccagccctccctgttagagcattactcctgtcacttacctcaagcccttgtcctcctgtcccctcgcggggagtgagggatggcccagtgagccgaggggctgcgtcgccattgctcgggtgtggccacgtactgtctcgcggcttccgttggtgatggcgtttggggggctgtccagggaggcagggccttcagcccaagagtgaactgctcccgcgcccctcctgtaagtagctgcttgcactagaggaaaacctgcctttaggtgcccctgagcatctacgtggaagggactagaaatgagagacccaaagatctgagccagccgcgaacagaaagtcggcttcgcaaaccaagtcacaagaaccagccccacttgagactcgcccgtgaaccattcctcttaaccaagtcttgtttttcttttctttaaccttctagtttcagaataattatagattcacaggatgttgcaaaaatagtaaagggaggtgagggggcttctcacccgggcttccccactggcagcatccgtaaggcgcaggatgtccccggccaggaagctggtgcgtgtgcagcctcgggagcgccattccacgcacacttgcgtgccggtggccttgttatgtcgttctttttttgtctacactgtttgagtgcttttccatcattgaaagggcttcattacagtctcacattttcccttttttttgcctaatgctaatggtcagactttttaacagttttccacatgctcttctgatccttttcctctggggtgagcagtcaccactcaccaaaccctgccccacccattgggcacctgtctggatggtcccaggaccgcaggtgctgtggggcacccattggggacttccaggaaatcatttctgcaggatccgttcgcacacacgaagagcacagtgccctcgggaagggccctttccgaccacgctgccccactggggttgggtcaccgggacatacagaggctggtgctgcctggcttctcctgcctgcggtgggagctgggttttgctcccgtttggttttgttttctacctgtcaggctgggcgtctttctgagggttccctgaccggcctctgaattgattgtttgtccacgtgggcctggaagtttctcttaaagactaaatgcccctcactggggaaacgacgctgtgccatgttcacagcagacactcaccccagtgggcctccctttttctctggtcacgttggttacttcataggcctttaggttttgatctgtgtttatggaccacggcacttccttccttccacagtgcggtcagacacaggctttgtgtgtctaacgacagactgtttccagtagtttttctaatactttagttttaaaattttaaataattcacttgttttttggcattgaaaatatttcattcataaatagtttctagttatgatttaaataattttcccatttttgactgtagtttcccagaatcctctttagaatctcagtccttgtgtttgggtcttctccgcgtgccattacctcacctctgttttgtgccacacactctttaaaagtgtcttcccgcggggtttagagttaggaaagtcgcgcacacataggacagagccccagccgcccctcgtggcacccctcccatcccaagggtgcgtttgtcgcagctgggaacccagtgcagcaccccactcagctgctggtttcactgtctcatcattggtggttagactcaagtagtgtggggtatgtgaatctgcctttcagattctcctgatcttttaagcgaatgacacaaagtcaggttttaacaatatcgtgctaactgtgttttctcaggctgttacacctggtgcttgatatggatttgacttgtctattcttttttttttgtttttcttttttctttaattctagaaccacgttcgtttgaagtaggaatgctagtctggcataaacataaaaaataccccttctggccagcagtggtaagaacagcttcctccgtcttctcagatgtagttacttaaatttcatgaatttttattccatccatctttagttcttgataatttgatcaggataaatgttttcattgttttgtttttcctgggaaaagttggtgggtttttagaaaagacttcaggagatgcctgtacctaaattaaggcacaatggtgttaagttgataggccacattttcaccaagcaggcttagaaagacctactcgaaaaaaatatttgcggccgggtgcagtggttcatgcctgtaatcccagcactttgggaggccgaagtgggtggatcacctgaggtcgggagttcgagaccagcctggccaacatggtgaaaccctgactctactaaaaatacaaaaaattagccgggcgtggtggcgtgcgcctgtaatcccagctactcgggaggctgaggcaggagaatggcgtgaacccgagaggtagaggttgcagtgagccaagactgtgccattgtactccagcctgggtgacagagtgagactccgtctccgggggaaagaaaaaggaaaaaaaagaattgtgatttgctcattttaaatattgtgcatttcaccccatgagagctcattaatttggattttgtggtggggttggttgcatgtgtacaaacaggaattcgaaatcctgtccaagttcccggtgtgggtgatgagttcaagccggggcagattctctgcttctgtctctgcaggcctggaagttgcaggtcattggtttgggtgctgtcctggccttcgcctctccttcatatcttacccctttttccctttatcctcctaagacacaaacgccaaaaggcgttggccctgcagtaatccagagacgcctttgttgctctaatgactgacctcactcgagtcacccaggctccttgcatgtgactgattgtggttccgggaaaccggggattgaatctgtgtggtgttcgctggggaggttcaacacgtttatggcctagctgggctccttgtgtcgcctactggccggcggagatggaggccgggcttctggaccctccgccctcccttggcactggtttcctctcccgcaccttggtagtctttcccttgttttcatcagtttctggggtccctgctgggttaacaggtcactgatgtgacaggttcctggggcataagagcaggcagcctccctgagagcgcagggcggaagggccatcggaggcgctggtcgccactgctcctcactgccttctcacggtggccccgggaggccaggactggggaggctgtggggaggtggcagcgccctgtagtccctgcccctccccgtgtggcctgggcttgttcccgagcctttctgcacttcctccactcacccagagcattaggaggacaaacctgccctgctgagccgctggagaatctcaggacgcttatttaaagaggcagctggcagcggtagctgtggttctttttattcaaaaacccaaacaaaactggctgattccgctcagatgggaaaacgttcaagtgatgcgtgtggcagagcatggggccgtttctcagcgcctccttgcgggagacttcgctggggtcacccccagagctggggtcagcgcctgttagatgtatcatgtgatgtcacaaaaaaatatttaaaatccacgatctcttttgttttgacgttttattttcttggatttgtgaacaggtcaaaagcgtcaggcagagagataagaaagcaagtgtgctatacatcgaaggacacatgaacccgaaaatgaaagggtaacccgctgttcttggtttctgtgaatgggcctgaggggccaggccggccgctctcagagtcagagcgggcgtggggatggagggacagaggggaggccccggcaggagtccaggcccgggcagggctagtgaggtctcactggaggtgtgcccttcttgtggcctctcactccctgggatgggtgagtcagacagaggctgggtgtgaagggtctggtcaaacaccccagttttcacaacttgatttgctggctttgaaaggcagcccaaccagacactcactggggccctgtttcccacaaaccagcaaaatgtccacgcaggtgtgcagacagcatccctgcgtccacctgagtttgcccctgggttacctggtcgttccttagtcatgggatgaaagcacacgtggatggatcagccggctgaaagcagcctttagaaccatcgcattgcatatccccaagtcgaacgcgcagaaccggtgtcatctggtacttctgtgctgcccccgaggggtgggaggtgtggagtggagacccaggccccgaggtcggcctgtcctggcggggcccagtcagtgttgctgaagtcactggacccaccatggtgcattgggagcttcttggcagctggggaaacggtcaccttccataaataagctggggctggtggggcctccagcggcctccactgatcttaatcagagacagggaaaggtttttagcttattagaggaagttcattcatgttaacttttccctctctctgcttcaagtttcacagtgtctcttaaaagtttaaagcactttgattgtaaagagaaacagacgcttctggtaggtggatgatgttttgtgcttgctttaaatggtttactttgtgattagtaaatatgtcctctgtgtgtagctcttgaaatccatggctgcggtgtacgcgtgtgaatgattgtgggaagtagcagagccaggctgcgctctggccgttagagttagatcgtgggctcagtcactgcgctgaattctcacaactgtcctgggaagttgcggccccatttccccgctttacgggtaaggaagctggggctccggcgaggacagtttacccagggccaccaggcaaggctacagcagagagcctctgcgcaaggccaccgccttccctggccgactgtctcagtccaccccatgtcacggtggcctcggtagccagccccttgcggccgggggcgtccctagctcagcgtcgggagccctgtgggcgctcaagtgctgcagtgagcctggccgataccacgtggcagacgtcttgctgcagagtggcttcctgctccctggatctgcagccagctttcatcatgtgctgtcgatgaactgcaagggatttgtctaactcagaaatgtctatttcccctctggaaatactcattttgttgtggcgacttccagcaccaacacgtcaactcagtgcagttatttttactcctctggaaaaaaagaaaaagtggttgtgtcttttccactctcagggatctgagttactttcttttgttttttttgagacggagtctcactctgttgcccaggctggagtgcagcggtgcgatctcagctcactgcaacctccacctcctgggttcatgcgattctgctgcctc[131 bp omitted]tcagcctctcaaagtgctgggattacaggtgtgagccactgcgcccggctggaactgagttactttctaaaaatggatgaaggtgtggggtgaggagaagagcaggaagttccgtgccttaaacgcagaagggctgccgtttatatcaaaaaccctgggttctgagagcacagggtgcccgcttcttcttcctaagagtgcgctcacatctgcttgtgagtcaggtatgtggtggtcccgaagcccacttgattcagtggtagtcaccgtggcttctgagggatgatattggggaagccgtgctttaggaaagtgcgggggctgctgggcaggcagagagcggcgtccacccggccctgggatgtgcttatggggtgcccccgtacccctagtggccctcggctccagagtcttccctgggtcattgtgtgatggtcgtggctttatggcatctttgggacggctgtgtccttttctggggacccaccctgctgccagcccaggtgctgttagagcagcccaggtgctggcctagcctggctgcagacgatagctcccaacaaaaacggctgttagagcagcttatttccaggacttgatgtcctgtcatgtggcacagtggccacaggggaggtgtttgcaccgtcgatgcgttcagaccagcccaagccttcgggtccccggtgcccacctgcgttcagaccagcccaagccatcgggtccccggtgcccacctgcgttcagaccagcccaagccatcgggtccccggtgcccacctgcgttcagatcagcccaagccatcgggtccccggtgcccacctgcgttcagatcagcccaagccatcgggtccccggtgcccaccatttgagcagctcagggcccagacctgtgcctggtgcgtttcccatttaccagagggtccctgtgcgaggcgtctgccagagccccctttgtcagggagggtcagaggtgcgggctggagcgtgagcagcctggacacctggctggtccctgggctctgcgtggcttctgaacccagggtgcttggcactgcctcccactgacgcctgctgcccggatctcattgtagaatcaagccagggaggacttcaaccaggacatcggctggtgtgtctccctcatcaccgactacagggtccggttaggtacgtggggtgctggggaggggtggagctgggcagcaggcgtccagcctctgaagaccccttggacgggctgggccggagctgcctggaggcggggcatatttccgtgggcctggggcattccctgtgggtgggctggggttctggcctggcctgattatttcctaaacagagacgccgggccagcccctggaacacacttcctgggactcctcttaggtctacacagtgctctctcccctccaccccctgcaggctgcgggtcttttgctggctctttcctggaatattacgcggctgatataagtaagtctacaggcacatcttggaaaatgtggtttgccttttagccctttagaaaaacaatcttctatgtctgaagctgtggaaggggacgttggggtcaaggcactgtccgcagccacacagcattgttcaacctctatgaggttttgatgtgaccctgaggctccctgggacctggggctgctggtgtccactggcacagcatcccgagcctgccctggggccctcatcccatgggccacatccagcgtgtccctgctgtggctggtggctgcacacatcagatgttgtgaagaatgtaggccaggtgcggaggctcacacctgtaatcccagcactttgggaggctgaagcaagaggattgcttgaggccaggagttcaagactagcttgatcaacagagcaagaccccatctctacagaaaaatagaaaaaaatgagctgggcgtgtggcttgcgtgcctgcagccccagctactcgggaggcagaggtgggagaatggcttgagcccgagagttcaaggctgtggtgacctatgtgattgcaccgctgcactccagcctgggtgacagagcaagacctggtctcaaaaagagaacgtgtcacgaacaccgggatgtttggccaccacttcactgtcgatccagcattttcctttatcgacagtagtggagttttccatgcctcctggttggtggaggagtggacgtggctgaattgattctgcttgggcagtgctgcacgggcaggcgcttttctctgctataagggttaaacctggctgcagggcccagtgaggggggaaaggccgggggtcccagcagaggaagtgtctttaggagcgtgaatgctccactcccgtgctaacacggagctcgatcgctagggtctgcccccatccctgccatgtcgcagcctcccatcggccctgacccacagccacccgaggaaggcagcccacgcgctggtcccacgacaggtgcttcttttgcaggctatcctgtccgaaaatccatccagcaggacgtcttggggaccaagcttcctcaactgagcaaggggagccccgaggagcccgtggtggggtgccccctggggcagaggcagccctgccggaaaatgctccccgaccgctcgcgggccgcccgggaccgggccaaccagaagctggtggagtacattgtgaaggccaagggcgcggagagccacctgcgggccatcctaaagagcaggaagccatctcgctggctgcagaccttcctgagctccagccagtacgtgacctgtgtggagacctacctggaggatgaggggcagctggacctggtggtgaagtacctgcagggcgtctaccaggaggtgggggccaaggtgctccagcgcaccaacggcgaccggatccggttcattctggacgtgcttctgcccgaggtgagccgcggaccggcgtgtcacgtgggcagggaggggcctgcgctgggattttgcaactccgcacgaggaggctgccacggtcctcgcccctgctccctggccgttcggcggccaacggagcgtggaggcctcctgtgtttacatcctgtcagtgctgggaaatgcgagtgcgtgcgcttgaccctgtgcggagacggagccgcttacttgacccctgtgcagagatggagctgcttagaagctgtcagcaccagggggtgcgaactccctccctactgcgggcgcacagatgcttcccagcctcggtgggtcagtcctgggaaacccactgcgagttggaaattcccaagtcagaatcgcatttagtacccagataaacccactgtaagttgaaaaactgtaagtggataatgcgcctcatactctgataaacccgtggtaagttaaacacacaaattagactgtctgtgatttcgaacttcagctgcggatttggggcttggtgaggagcaaatacagatgattttgaagtttgtatctgaaatttcagagaggacattgctgggcatatgtgtacatctgtgggaaaaaaacatactcaaaactatttaactttataactatgggaattttcaaatagacccaaaaagaaaatagcataatgaactctaatgtgcccataacctgcctggaattattttttggagcataaaaaccctcaagcttttttttttttttttttttgagttggagtctcgctctgtcacccaggttggagtgcagtggcgcaatctcggctcactgcaagctctgcctcccaggttcacgccattctcttgt[222 bp omitted]tctaaaaggagggtgattctgccccctgggggacactggcagtgtctggggacatctgtgcttgtcacagctaagggtgcttctggcatggagtgggttggggcagggacgctgctcagcaccctgcagcgcctaggacagccccacctcagagaacagtctggccccgacgtccacagggccgagtgggagagactctgctctgaaccgaatggactctgttaaaaatgtgtttaccataatcacaaaagtaaaaaatagggatgatttcttaatgtcaggtatgtattgtgtattcaggatactcttttttttttataacaataaacttaaggccgggtgtggtggctcgcatcggtaattccagcactttgggaggccgaggcaggtggatcatgaggccaggagcttgagaccagcctggccaacatggtgaaaccccgtttctactaaaaatacaaaaattagctgggcgtggtggcgcgtacctataatcccagctactcgggaggctgaggcaggagaatcacctgaacccgggaggcagaggttgcagtgagctgagattatgccattgcgctccagcctgggcgacagggcgagactctgtaccagaaaaaaccgccaccaaaaaaaaaacttaaaatttttgagaaatgctcttgtgggtttgggtcttgccttttcttctctgcttttagtgatctgagctattgtgtctagtccgaaagatagtactgatttaattaagaaacatcattacaagcagggattcatggactaggtttgcaccttctgaaccatgagctagaccatgtctggaggctggaacctggtgacccaggctccctgcggccttcttaaccgcaggccacttggggccagttgggcagtgcctgctgctattgagccccgtgccctctcacaggccatcatctgtgcgatctctgcggtggacgaggtggactacaagacggctgaggagaagtacatcaaggggccttcgctgagctaccggtaggccgctcccggcgctatctccagccacttgcgtctctgccttgcagtttctatttccacacccacaggcagtttgactccaggctgccgcagcccctctccctcatgaggtggcccaggtgctgggtggtgagctgatcacatacgctgaactcaccctgtgggtcactcctgccccccaggaaggctgtgcccgggtctcccagctggtcgctgtgggcagcacggggccacgggcacgtgcctgggccgtgtctgttcttaatctctttttgcaggggctgatgtttgctttttgcactttcctcccctctttccacagccccatggctgtgtgagaaatacagcaagattaagcagcagcacggcccggtgctttccagcagccagaagaatgctgtgatcaagatgtttctctcacatccgtgtgcttagctgcccttggatgtttggcccccagagcgcctaatcctgtctctgggcatgcggccaggccttgctgggagccaggcggggcccacggggcagtgacaggctgaagactcaactagagtcaaggacagggtctccggccagggtggcttgcgcagccaccgacgtctcccgggcccacagtcacaggagactcctggtgaagacactgaactccctcaccagccccatgtcctccctgggcagggcaggaggggcccctggagaggccagggaggaggtgtggggcctcggtggcattggcaggccacccccgcagagctgcacaaaggtggaatttggccttgtttagggagtgttggcccagctggcttaccaaaacaggaaaggcctttggatacagaaactgggtgttttcctgctggatcttcatggttcccccgtcatgcttgccgtaagaataagtgaggtccggggagggggtaaggtcggagccaggacacctggacccagcctgctggtttgtcctctccctccgtctcagaagcctcttcaccgctccacgcccatctgtggaaatctttcatcctgatttttttttttgagtctgggttgccgacatcaaaacccgttaggagttcatcacagcttccagttgccatgaaagcctcccgtgacctgtgagaatggtgctggtgctgatggagaagttacttgggctgagcacacaggccgtgatttcatcacgccggggacatgctcaaaataacaagccagtgagcagcatcgcacttgatctttggcctcagtggagccttgggtcacacactgggcgtcctgggacccagtctccccgccgcacggcgtttcccaggccctcttgttcttttagagttgcaccatgagcctctctgcactcttcccaaggctgtcctcctcaggtctgcctttctctggtgctgcggccggtgtgctctcccctatttccaggtctgctggggcgcacatcagagccagcagccgttgttgatctcttttgatccagggcagccctattgctgagaggggttgctagctaagcaattgttataattttcctttacagggaggtcacttagtaaggacaatttggcatctcatactctttcgtaaaaaattatttttagtcagtcacagtggctcatgcctgtaatcccagcactttgagaggctaaggtgggaggatcctctgagcccaggagtttgaggctgtagtgagccatcattatgccactgcaccctagtctgggtgacagagcaacaccctgtctctaaaaataaatattattttaaaacattgttaaggcctggtgcggttgctcacgcccataatcccagcactttgggaggccgaggcaggtggatcacgaggtcaggagttcgagaccatcctggccaccatggtgaaaccccatctctactttaaaaaaaaaaaaaaaccaagcatggtggcacgcgcctatagtcagtcccagctactcagcaggctgaggcaggggaatcgcttgaacccgggaggtggaggttgcagtgagctgagattgtgctactgcattccagcctggtgacagagcgagactccgtttcaaaaaaaaaaaaaaatattacacatcctgtaaaagttaccatcctaaccttcttaagtgtatggttcgatggcggtgagcactttcacagtgctatgcagccggtactgctgctcatctccgaacttcatctttccaaactacagctctgtccccatcaaacaactgccctctcatatatatataatatatattatatatataaaatatatatagccatatatatttatatataatgtatattatataaaatttatatattatataaaatatataaattttatatataatatataaaatcatataatttatatattttatatataaaatatatattatatataaaatatattatatataaaatgtataattttatatattataatatatacaattatataacaattttatatattatataatatataattgtatatattatatataaaatgtacaattttataatatataaaacaatttaatatataatatatataaagtatgtatactttatattatatataaaatatataattttatatatcatatgtatatgtagacatacacacacacacatatgtatttatttatttttttttttttgagacagagtcttgctctgtcacccaggctggagtgcagtggcacagtctcggcccactgcaacccccccaccgtgccttggttcaagcgattcttctgactcagcctcccgagtggctaggattgcaggtgcccactaccacgcctggctaatttttgttatttttagtagagacagcattt[140 bp omitted]acagaatttagctctgtcgcccaggctggagtacaatggcatgatcttggctcactgcaagcaccacctcccggtttcaagcgattctcctacctcagcctcctaagtagctgggattacagacatgcgccaccacgcccggctgtttgtttttttttttgtttgtttttttttttttttggtattttttgtagagacagggtt[139 bp omitted]actaaaatgaagactcttgttttctgaagggaaaaagaaatatttgacaaccagctccttgaagagcggaaccggcgccgtcggtgagggagcagccggctgtgctgtcagcggggcctggcggtggaagcgcctccagtgtgcatgagcgtgtctgaagatggggggctcagggggcacgtttgcgtttggacctgtctgtgcgttctcctgcgtggcagtcctgatttccatgcttctggagaatccatttcgttaacactgaaagccagttctcttttcctggcagtttttttcattttatttttggcattttttacaagataccgttcgggaaaggcttttgaaaggacggaagcgtattcactgtgcgccagtactcctggctgtgctgtggtttctcccgacgtgcacatcgatctcgtatgtgtggcatctgatattaaacgggaggttttaagaagcgtctgccgtgatcatggagcttcggaagcgggaatggttcttccgggtttgctgttttgtctgtttcccccttgtgtggtttccgcctgcgacagttccagaatttgctctcccactcagtgtgctctgcagctgtgaggaaacagccttcgttagaggcgggagcagagacgagccgctgctctgtgtcgtgtttgctgtggccgcagggagaggagcaggacacgcacctttccaggggcctctgtgtcccgcactgtgtgtgagtggaccgcagcgcgcagccacatgccctggctgccatgggccagaccgcctccacctcccccgcccgcctggcctgtcctgagtgcatttccctgcactgtgtcgtcactgcacagccagtcaccgcggtctcagtcatcggcgcggatggctatgctggggtcccagggtggccgcagcagtcagggtcactgtgggagccctggggtggagtgacaaaccgcattgtcctgtgcccgccatggcagaagcgcagcctttgtatggaggcccaaccgcgctcccgtctggagaagcggcttccggggtgtggctgccgggtcggctctggtccacagcacggtgccggggctgcaggttgttgagggctgtgactccgtggggctcagccaggctccagcagggtcagacgtgctgttaagagcaaagccacagacgatgacttgtccattctcagtggatgctccaggctgtgcctacacagcagtgctggtgacatgtccagggttccagggcccggtggcctgggagctgctttctccccactggctgggctgcatctggccctggctggaggccttgctttgaggggctgtgaccctcttcccccaggccctccccagccgacgacagccaccggagaggagatcggaacacgattgtctcagatgcagggcgctgtgcgggacgaagccgcaaggactctcgtatcgggcccttgggactcgggaggtgccagaggcggcggctgctctggacctcggtgttcactgacctttgtttcacttgcctctgctcgactccgagagcaggaaacccggccgtggcctggcagctccgcctcccatgcccgcacgctggggtctgtcttgtctggagcagtggggcacaccccggaggaggcgggggtcagggctgtcggccttggccccctgctggtcgctgtttcggggactcggggcggccagtaccaccgcctgaggcggggctcagcagcgttgcatgtacgggcctcgtactgcctcatggaaaatcctccggagccgccctccattgtgggttcctgagagtaggacacattgccatggttttgtgggaatcacgcgcccctgatggaacttttctgctgttgtgaagtacttttatccatttgcttctctgctgaccttgccaagttgttcgaggtggaattaaacacctcccagacctctggcttgtcttttctgaacccccaaacacatcccactgcatgggttgtccaagcttggaaatgggagagtgaccctgccatccccagggacatggcctggccttggggtggattcccacctcactggcgggcctagggtgctgtttaaacagcagccagaggctgggcgcggtggctcacgcctgcaatcccagcactttgggaggccaaggcaggtggataacctgaggttagaagttcgagaccagcctggccaacatggtaaaacctcatctctgctaaaaaaaattagcgagcatggtggtgggcgcctgtagtcctagcacctggggaggctgaggcaggagaattgcttgaacccgggaggcagaggttgcagtgagccgagatcacgccactgcactccagcctggccacacagtgagactccgtctcaaaaaaataaacagcagccaggggcctcactggggttcatgcctgtggccccagctactggggaggcttagatgggaggaacacttgtttggaggtcaaggctgcggctccagtgagccgagatcacgccactgcactccagccggaatgacgatgagcacctgtgttgcagcatagccctgcccagcaggtggaaccagaatgtgccagaggcccccttgtgcgtcccaccccgcctgcaccctctgcccttactgtcctgtgggctctgagggtgtcaaggccgctgggacaggccctgcctgggtgcttccctcagtaatggggggtcgtgggtgctctgggttgtcagccgggcagttgagtgggagtcaggggtgctgacctcacaggcacggccagtgaggagcattccggggccctgaggatgccagcatgggtggtcctgggctcgccctctccacagcatggctggcgttcctcgactgccgccggagccccgggaagacaggcttgaccccgtgcacacacgcagggagacgccaggagccctgccctcagaagcctgcacgctttgcctctcttctggcagctagctaaccctgcatccccacctgagcctgtccctggcactgaggacactggacctgtgtcactggggtggggtgtcctgggtcctgctgggtgctgagtgtctccatgccaggagctcccgcctctaccatcgagatgaccacagatgtccccagacgtggcctggtgctccgtggaaaactgctgtccacaaaccatggcgtccttcccctgacccccgccccttccctctctggcttggcccagcgggtgtctcagaacctgggtgcgtgcttctgccagccccccaaccacctggcccacactccccaacccccttcactgagccgcagagacccccatgtccctgccaatgctttttccgaagccggtctcacttgttcccgccctggcagtgtgaggggaattggggtcccccctcagtggcacagctgtgcctgtctgatgacttccaccaagcccccttcactgagctgcagagacccccatgtccctgccagtgctttttccgaagccagtctcacttgttcccagcagtgtgaggggaattgaggttccccctcagtggcacagctgtgcctgtcggatcacttccaacaaggtggccttggtggccgcacggggcacttcgtccatcttaaaggggcaacacaggcatgcagcgagaattccaaaccacagaaacctcactctcatgggccccactgcctgaggcattttctgttttgcttttgttggtgggttggttggttggttggttggtttgagacagggtctggctctgttgcccaggctggagtacagtggtgcaaacgtggctcactgcagccttgacctccctggctcaagcgatcctcccacttcagcctcccaagaagctgggaccacaggtgtgcaccaccatgcccggctaatttttgtgcttcttgtagaaatggtgcttgctgtgtttccgaggctaagtgatcctcatcggcctccaaagtgctgagattataggcgagagccactgcagctggcctgcctgagttcttgtgcctctctgcctccctccctgtgccagcctcacgccccctcctcaccttccccaattcctactctcaccccgccctgggtccttcccctctcactggcctgagctgtttctggaactgctgcctgccctctgctcatgtcctgcctctgccccgtgaaaccagctcctccatgttccctgtctcaggggtgtcctccagggcccggagttcctgaaccagattcttctccccacctacctcacctttctgtccagtccgcctatcagtcagccccctttgcagcagaatgccaccccaaaacccagcgcctggaacattctccacacagtttctgtggggccgggatctaagggcagcccggccaggggcttctagggtggctcgtggggctgcagtccacatgctggttggggccacatcatcagaaggctccaacggggctgggggtctgaggagcctcgctgggggcagcagcccaggagccacagcagccgcccatgaatatcaccgccattctgttggtcacacagagcagccccggttgaacgtgaagaccctataggggctgggcttggtggctcacacctgtaatcccagaactctgggaggccaaggtgggcagatcacctgaggtcagaagtttgagcccagcctggccaacatggtgaaaccccatctctactaaaaatacaaaaattagccgggtgtggtggtggatgcgtgtaatctcagctactcaggaggctgaagcaggacaattgcttaaacccaggaggcagaggttgcagtgagctgagattgtgccattgcactccagcctgggggacagagcgagactccgtctcaaaaaaagaaaaaagaccccataggaaggcaagagcctgaacagcaaacgcaagcccaggagccctgtcatcccagcggccagaggaccatcccccttggctcccactgaactcagctgcagtccccaccccatcccccaccaccactagggctaagagccagcagaaatccttgggctggcttcattgttcctcccgggaagagtccagggcagctgacacatgatcccagcatggcacgccggggacaggggaggcactctgctgtccctgactgtatttaaaaaaaaaaaatccacaagcaaaatccctaatgagcaatgttccacagtaagtcctgcctcagaactgtgcaggcatcagaaacaggaatgcctgagaaacggccacggtcccaggagctgaggaaacaccacgcctgatgccacgtagggtcctggatggagccctaggccaggaaagggcattagaggaaacccaggaaacttggatagagtgtagattttggtcagtaataatgtatcatgtgacaaatgtatcacactcatgaactgggcatggggtactcacaactctaaattattctaaaaatattgatataaatttaagaccaaaaccatggccaggcgtggtgcctcactcctgaatcccagcactctgggaggccgaggtgggcagatcacctgaggtcaggagttcgagaccagcctggccaacaaaccctgtctctattcaaaatacaaaaactagccgggcatcgtagtgtgtgcatgtaatcccagctactcaggaggctgaggcaggagaatcacttgatccagggaggtggaggctgcagtgagctgagatcttgccactgtactccagcctgggtgacagagcaagactccatctcaaaaaataaataaataaaaataaaaccaaaaccctacagcacgggcagctatgagaactagagaaggaagagggttttgtgcacctgccagcctcttaggttcttgtcagcttttcccccaagtctttattattattatgtattgtagagatggggtcttgctatgttgcccagactggtctcaagctcctggcttcaagtgatcctcctgcctcggcttcctaaagtgctgggattgcaggtgtgagccaccatgctgggcccctccaatccttttgagctgcccaagaacagagaccaggcctggctttgctcagcagtgggtccccagcccatggcacgaattcagtaaacacttgttgtggtcctcaaggggcccccagtcttgctagtcacctgtgttcacctaatttgagcctctgttttctttactttttctttttcttttttcttttttttttttttttgagatggagtctcactctgtcgcccaggctggagtgcggtggcacgatctcagctcattgcaacctccgcttcccggattcaagtgattctcttgcctcagcctcccgagtagctgggatttagatacagggtttcaccata[131 bp omitted]caaaacctccagtggaattgtgaaaattaaatgatatgcatgcagaaagcgttctgcaaactctgttttgctagtttgggtgtttagtgttagtttttatatcattagtactggttgtaaacttatcaatttaagcaagatggaaaatcgagggtgtgtcagggaagggggaagtttgagctgaaattatgacctcttaggggtgggaagaggaggctttggggttgtgaggtctgagcccccttactttgggatgagtccacatcgcggcgactcctctgcagaatgcggtgatgttgcggtaaggggtccgggatagctgcgaggcagctggaccaatcctgaacgaaagacatcagtgatcgcaagaggcgctaaaacttctgccgaaacccgggatcgaaccagggacctttagatcttcagtctaacgctctcccaactgagctatttcggctgggcggcagagtcgctctcgccgggactccgtcccgcgctgcgccttccctgcgcaggcgcagtcgtttcgcgtcagcaggccccacatcctttgtaaggtctcccagggcgccggagcgcagtgtcgtctctgtggcgcaatcggttagcgcgttcggctgttaaccgaaaggttggtggttcgagcccacccagggacgcgtggtgacttttgccctcctggaataacaagaaaatgagtgtcgcctctgtttttgtcggtccgccgcagacccgcggcccccacgtgcgcactccgatgacctttccgcctcgggtgatctgggggtgcacggcgcaacacgaccacggaggccgaaagcgcagcggaacctcccggctccaggttccggtttccgcatgcgctccgagccgctttgggcggcggccccgggaacccggagcgctaaggagaacggacctcagaggttgtctgaaggccgaggccaagatggcggtgctgtcaggtgagcgcggcaccggcggcgggtgtggggccgcgcgggtctggggccgtgggagcctcgggtgtcgtggtggcgtcgggggtcggtgccggcgtcgtggccgcggtcctctccgggcttctccgagccggccgctcctcgggctccccgcccggcttgcgatgaacggtcgccgttattgcgtccagagtacagtcggggaaaccgaggcccggtaggtcatgacgcaagcctccagcctcaggaaggcgctcggggtggaggctggaggggccccattcacgtccccgagaccagggcacggcccgcgaggctgctcttgagatgccctggagagagcggggcctgcctgacaggctgggaaactgaggcccattgagggtcttcgaggtcacagggccgggcctgggaaggaacaggacccaggacatccacgccaccctgctggaccctccacctccctccccacccctgggaggtaagggcctctcgcagagcctgtcctgctccagggacttttttgggatcagctgaagcctgcggacctctgctcagataaagttattaaatgcatggaataaaatccatagaattgcaaggaaatcagttacacggagaggcagttattaaaagattgtcttgaaacctgattggcgacttagtaatctaagtgcttcccttatgaacgcgatctagcggcaggtctaattgcgactgtgatttggaaggagtgaggagtggaaatgaggctttgatgatacggaaacgtctgcagcccctgcaccatagctaggaaacatctgtgattccgcttggtgaaaagttacaggtcctgctaatactgccgtattttgttgtctatgctaagaattttttatttatttattaagacagggtctgcctctgtcgctcagactggagtgcagtggtgccatcttggctcatcactgcaacctgtgcctcccaggctcaagcgattctggcacttcagtgtcctgtgtagctgggaccacaggtgtgcgccaccatgcctggctagtttttgtatttttagtagagatgggggtcttgccctgttgcccaggctggtctcgaacttctgagttcaagcaatcctcccacctgagcctcccaaagtgctgggagccacggcacccagcctacgctaagaattgaatgaagggctaattttccataagatgctggtgacaacaaagacatatatatttttttattccaagcaaattc[134 bp omitted]gccaacatggagaaaccccgtctctactaaaaatacaaaatcagctgggtgtggtggcgcatgcctgtaatcgcagctactggggggctggggcaagagaatcgcttgaacccgggaggcggaggttgcagtgagctaagattgcaccattgcactccatcctgggcaacaagagtgaaact[132 bp omitted]agaaaccctgtctctactaaaaaatgcaaaattagctgagcgtggtagcaggcgcctgtaatcccagctactcgggaggctgaggcaggagaatagcttgaacctgggaggtggaggttgcagtgagccaagattgtgccgttgcactccagcctgggtgacaagagcgaaactccgtctcaaaacaacaacaacaacaacaaaaaccctgacccagaggcacagaatcccatcacctcagaggttctcagaagagtatctcctctgctaggagctcatccaaagtcctgcattttcagcttgggaaactgacacctggagtggggcagctcccaccagagcctggggctgggcagttagcctgtctgctgtgcccagcctcaggcatgccaagaagtaggtcacaggcttgtgtccttcagagagttgtggcctggacggggccatgggaaacagcaaccccggatgaggctaaggctggggtgagggaggggctcagaggcaggagaaggccccatggatcgctgcattcaggggcatcaaaccctggccctggcccctggaggctgcccacagcctctccatcgggcctcacctcacccacagcgacaaagtaccatcacctgggcagcttcaacagaagctgattgttctcacagttctgggggctggaaggccaagattgggggtcagcagggttggttcctgctgaggcctctgtccttggcttgcccgtggccatcttctccctgcgtctttcctctgtacatgtttgtgtcctgatcgccttttcttacaaggacataagtcatatcggatgagggcccaccctcgtgacctcactgtcctttataatgaccctttattttattttttgagatggagtctccctctgtcacccaagctggagtgcagtggcgcagcctctgctcactgcaacctctacctcccgggttcaagtgattctcctgcctc[134 bp omitted]cggcctcctgaagtgctggaattacaggcatgagccaccacgcccaggcattaatgatccctttaaagaccccatctccaaaagcagtcacattctgaggtcctggggttagggcttcagatgcaggtcgggtggagggtcacagttcagccgtcaccagcaccaagcctgcctttctggattcttccttgtgagccaggattcctggcacctccaggtttcctcccgctgagtgccccgggcgtggcaaggccctgctctggccttagtcttcgcctcgggaaggctctcccaggagacttcgtgcaggcgcgttccctcctctgcgcttcctttgaggctggctcctctaggggtgcttttctgtgtagattgacgtgggcagcgccctccccgcttagcggactgcagattcctgcaggatggggcctgtgctcagctgcgtgggaaacgcccgagcagcagccagggcctggagcacccagcacacgcttgtcaggcacagctgaggccaggacgagcactgggtgcccagggaggccccagcattgctggagtggcaggcaccccacaagcacgcatagatggagatagaaccgggtgccggcaaccggaggacctggggtcctggtgtaggcgggacgccccgggtatctgaactgaaacctgcctcatgagaaggggccagcagtgtgcaagtgtgaggcggggtgtcccccgcagggcagcagccagtgtgcaagtgtgaggcggggtgtcccccacagggcagcagccagtgcgggggccctggcgcaggaaagcggcaggtgccagtgaagatcgccagggcggggagacggggcagcgtttgggttccttccggggccatgcagtctcaagcaggggactaagactctctcgtgttctgaaaaccccctcgttacctaacgtttgttaagtggcactcgagttgggatcagagctaggctgtgcgggcaggagcctgatggggaagcgcctggaggccggccctgcgtgctgcccgcagctcactgttcccaccccgtggtcctctctgcagctcctggcctgcgcggcttccggatccttggtctgcggtgagtgcctgagtctccagccctcagctgggaggggccttcagcagcgacagacgaacggggcggggggggtggggggtggggggagcgccttgttgaaggtcacgtgtcatgttagggacaggatgcaggtgacggtctgcacgctgcccgtgatgtgccgggaccctccctgggacagtccacgcagtggcaaaggctggacagtcaggaggaaaaccctgtgggcccggctcagtgccgtcagagctcaccgccacctggggtgggaaggcattctctgagccctgtgcagatggcagctggggcaggcctcctgcagacccaggtgactgacagggcggtgagggcgcatgcccagggatcttaccttggtcatgtgtggagggcctgctgccagtttccttctgtggatgatcctgggaccgtccttgcttggacactgttgacctgctgggtacgtcacaaaagaagttccattcaagtctgggccatcattgggggtcggggcgatggccgcatggctccagcggctctggccagtggcccaagtgttgacaggcagaggtgagaacagtctcgcagcagggaggggagaggcaggacaacagtgagtgcggctgggggagctggaggggcctgggacagccactgacccgcgttccatctcccggcagctccagcgtgggcccggctgtgcaggcacgaggtgtccatcagagcgtggccaccgatggcccaagcaggtgaagctggccttctgggggaggtcgtaccccctcgccccacccccatcccttccttattttctgcatcagtgccgcagccactgaggtgcatggatggggcagggagggggtcacacatcccagtccctgacctcatgtgggtccaggcctctggcagcggccgtgggggctcgcatccgcctctgggaagcacctgcgtggctgacgcctcctgtgcccgtgtgtctctgtgccagcacccagcctgccctgccaaaggccagagccgtggctcccaaacccagcagccggggcgagtatgtggtggccaagctggatgacctcgtcaactgggcccgccgggtgagtactatgagctgtaggccctcctcgagcgccagggcctctctgcacactcacaggcacacacatacacacaccaacgtgcagacacgtacacacacaacacatgcatgcacactcacatgcgcacatgtgcatgcaagctcacatgtatggacagatgtgtacacggaccacacgcacactcacgcacacaatgcacatatgcacactcgcacacatgcacacttgcacacacatgcacacacaagcacatgtgcacacacgcttgcacacatacacacatgcacacttgcactcatgcacactcatgcgcacatatacacatgcacacgcacactcgcacacacgtgcacatatatgcacagtcatgcacacacatgcacactcacacacatgcacacacgtccttgtgtggacacatgcatgtgtgcctgttggcatgcatgcacacaggcacactcactgatgcacacacacccctgcggccgtggagcagggcggaccctcccggaggcccctgtgctggcctggtggcctgtggttccatctgaggattcggaccctgctggagatgacccctccgtttccgtcattctctttctggcgtccgtgtgttcctcttgtttctcttttaaggtgaaagcagtgttttaagttaaaaggagcgcgtgtgaaggcagtagatccttctcggtacccgtttaaagcctcccctgcctgtggcgccagcccccacgcagcccctgccatccccctgcagcgtgagcacgtgcagctccctccagctcctgcggcacttgctgcgacagcccgggttcaacaatcccccattgatggacgttcactgtttccttttgttttttgtttcctaaacaatgccacggcgaacgtcctgccagggccgcagtggtcgagacaaggatagtttttaatgcaggat[132 bp omitted]cctcctaagtagctgggactacaggtgcccgccaccacgcccgg[182 bp omitted]ccagcggccgtcccaacacaggcttctggcgggcaggtggacctggccatttctgcccgggcagccctgcctcactctgtagcctgaccctgtcacccgccaacacatgcagcagggcccctgccaggtctcagagccgcgtgcagggagagcgggaacggtgggggaaatgagaagccacagggatggaggagaggggagggagtggccaaggagatctgagagggcttcctggaggcgtcgcacttggtatgtggacccagatctagttaacgcagagagttcccggttagacctgcgctactactcgcctgtagcccacgcgctcagagagtggctggagccccctgttgaaatggtgggacttaggatacactgggttcgaggaactatgtgatgaggacagatctcacccgtttctctctattttatgtatttgaatgtggctggtggggcgcgctttacaactcttggggcccggaggccacctgcaggagccgctgtgcctctcacctctgccggctgccgccccgggacatgagtcgggggttctgggtgctccacgtggagtctcacgctgggccacgcggggctccgggggtggcgtctgacccgagcccggcctccgcagagttctctgtggcccatgaccttcggcctggcctgctgcgccgtggagatgatgcacatggcagcaccccgctacgacatggaccgctttggcgtggtcttccgcgccagcccgcgccagtccgacgtcatgatcgtggccggcacactcaccaacaagatggccccagcgcttcgcaaggtaggcctcgtcccagccgcccagccgcccccagagtgagctgcgcacggaccccgcctctcttccaggtctacgaccagatgccggagccgcgctacgtggtctccatggggaggtgagtgcagggcggggggtctccagggacagacgtagcgtgagtgctggcctggccgtgccctgatggcgcttatcaaaagtgtcatctacattcagtgaaatcccacgtggtcccggcgctgcccttcagccgtctcggtgcctccaccctaggcagatgcgctggtgggcctctccccagaacgattcctcccatccacccccacgcagcagaccccacattccgcccagttctctgctttactcacacataagtgatgacaggtgctgtagatagttttataatctcagccttctcacttgccattagttttttttctttttttttttttttttgagacagagtcttgctctgtcaacccaggctggagtgcggtggaaccatctcggctcactgcaacctccgcctcccaggttcaagcaattttcctgcctcagcctcccaagtagctgggattacaggcatgcaccaccacacccagctaatttttgtatttttagtagagacggggttttaccatgttggccaggctggtcttgaactccctcaggtgatccgcctgcctcggcctcccaaagtgctgggattataggcataagccaccacgcctggccttgccctcattttttagtcatttccccgtaacattgaaaggtatttagtctcttaacattttaaaatatttatttatttacttaaagatggagtctagctctgtcgcccaggctggagtgcagtggcacgatctcagcccactacaacctccgcctcccaggttcaagcgattctcctgcctcagcctcccgagtagctgggattacaggcacctgccaccacacctggccaatttttgtatttttagtaaagaagaggtttcaccatgttggctaggatggtctcgatctcctgatctcgtgatccacccacctcagcctcccaaagttctgggattacaggcatgagccaccatgcctggccaatatttattatttttattttttagagacagagtctcactgagttgcccaggctggagtgcagtggtgcagtcatagctcactgcagccttgacctcctgggctcaagcggtcccccaaccttagcctctcagagtgctgggattacagatgtactccactgtgcctactttttaaaatttctgtagagatcaggtcttgataagtttacccttttaaagcgagcagttcagtggtttttaggccaccacctctaattccagaacattctcatcacccccaaatgaaatgctgtccccatcagcagtcactctgcatccccttccgagccccggtgcccacacctcccctccctgtctctgtggatgggcccgtcctggacatttcacagaaacaggatcacacgccgcatggccttctgtgtccggcgtctctcactgagcgcgacgtcctcaaggtgcatccgtgctgtggcctgtgtccgagcctcgtgccttttcttggctgaataatatcccactgtgtggacatattactaatctaattctaaacagttaattagaatattccagagttttcataaccgtctcccactgctgggcattcagggtatgtccatttttacggctgtgggaagcagtgctgggagtggagtctgtgtggtctcctggggtttccagctccctgccccgggtggaccccagcgcctcactgacagagccggaatcaggcgagggtgaggctcagccgccccatagacaggggctgggtgttggcactgtggctgtctgaagtggctttttgttgacacatgtgatctgacacatcccagccccgggaatcggtggtcaggagccccctcgggaggggagcacttttccccgagttatcagccacgtgtgagcttgcgccccactggtcccacagaggctctgggagcctgtgcgtgtttgctcattgcttctccgtgacaagttccagcctcgtaggtgcctggcctgcagttgaaggcgggtggggatggggcgaggcctcgtggagggagggtgggcaggcgggtcttcggcacactcccctcacggtgcctccccaacagctgcgccaacggaggaggctactaccactattcctactcggtggtgaggggctgcgaccgcatcgtgcccgtggacatctacatcccaggtagggccgggaccgcaccgcccacgagggagctggagacagggccagcgccacacggagcccggcggcccctgtgagggagtcccacacccccagcagacggcgggctcccccatcctatggatgggccgactcggagcgctgcctcttagtggagcctgtcccctgtgagaagtcggcgatgtattcaggcatcagagggatcagagggagcaggggaagctgagtggaattcctgacacacgcctggtttacagcagtttcatatggtcctacctggcacaaaccaaagacctgcagttagaaataccaagcgagaaggttcctgggggccaaggacactgtcccgcgccctcagccttacagaagggcacgcaggactccctgggacccggggtggccggatttggcaaatgaaaacgtgggaggcttagtttgactgtgaggttagggtgaatttgaccatcaggaaaactgttagtagtaattgtttagtacgagtatatcccaacaatatttgggctatactgacactaaaaagagcattggctgcatacctgaaattcacatcgcaccgggaacattctttatatctggtgatcccgtgggactcttgcacctcacgtggtcccacgagggccatccccccgggcgttcaccttgacagtggtccacggtaggcaggcttggaggtggcgctcatgtgggacaggggacagagtcctgttcttggccaccctgtgctgcgtgcggcattagctcatgcgcagagagcccagccctgagtcccgagtctgggggtttgggcaagcgagaggcacatcctggtgcctctcaaaagtggaggaacaggctctgactttggattccgcttccctggaaagggcgttgatttgttcagcgttctgcacggttcaggtcaccccgggggcagtggagagggcagcctgggcctccctgtgacttgacagcacagagaggtccatcctggggtcaggagctctgcccatgcccctggcgtcttcccctgcagtgcagaccaatggggcaagttgcgagtgtggactgtactcctccctccttgcagactgagctcctccctccctggggaccgcgctcctccctccctgcggactgtgctccctgtctggggactgcgctcctccctccttggggaccgtgctcctccctccctccctgcggaccgcgctcctccctccctggggaccgcgctcctccctccctgcggaccgcgctcggccctccctggggaccgcgcccctccctcccagcggaccgcgctcctccctccctggggacctcgctcctccctccctccctgcggactgtgctgctccctccctgcggactgtgcttctccctcccttggagcagcctggacttgccagagctctgccaggtggggcctggccgccctttcccaggccctgcagtggccttgtcctttctcacctgtttccactcctgctgtccccgttgggccctgggcttcgtcctcttgctcaagccctttgttctgaacctgcgtggcagccgggactgggggatccccagcaaagagctctggcttggggctcagaaagagggtcatcgggtcctcgtgggatgcccgggctctgggccacctcccctccctccgcccagcctccctgcctccatctccgtccagggcagccccgggccctgctccccactgctaagtgtgtctgctgagcgctggcccccattgagtcctgagggctggggccgggggccgggttagtgaggtcagcgtcttgtccgagaggtccctgtgacagcccgggatgagccacgggtggagggcagtggggccttgcccaggggaggaccccactcttcctgcagggacctcccctgcgccggctcccagtccctggcactgcgcccacccagggctgtcagcctccaccttcagaggccggcccgggaaacccttccaaagccgagccggctgcgctgtgcacgcggtcacgcgggctccggctgcgggaagcgagactgaggcaaggtccctgcaggctgcccacctacggccgaggccctgctctacggcatcctgcagctgcagaggaagatcaagcgggagcggaggctgcagatctggtaccgcaggtagcgccgccgccgccgccgccggagcctgtcgccgtcctgtccccagcctgcttgtgtcccgtgaggttgtcaataaacctgccctcgggctgccgcctcccagtgtggtgtgtgggtgaaaggagccggggacgtggggggatcacagaccccctgcggcgtgccgcccttgggctgggggcggttggagcagagccgggggcagagacgggcactgtgcctgccagcagggtcctttcccgctgctctgcgaagaccctggggtggacatcgtggcccaaagtcccgagcgtggaaggccgcacacccatccttcctgggagggccctgactcagtctccctctatgccctaaggcaggctgagcaaagcccgtctgagcctgccccggggttcagagtgtggcctgtggcctgcgtgtggacttgggcaggtcgccactgccctctggcccatttccaggcggtggcatgggctggttagctgagggctggggccagggagatggggaggtggcacctggtccaaaccaaagggctgcagggcaggactgtgagcctcacaggctgtctgaccccactttggggaccctctccacccagggctttcggggaaccctgactccaccccaccagccccttcatccgtcgaagtccaggcctcatcagggacgtgcattcattcagcaaacgtcccatcttcctgtgttcagcgccagatgccgccggtgctgggacctcgctctgcaggcccaccctgcatgcctgctgcacaccagggacagttctggggatcggcagttatgacgggccaggctgggatggggcccgggagactggggcgggggtggggaagaggcacccagcccagccgggtcaagcagcctggaagcaggacatgctggggtggggacagggcgtcagccagcggaacagcagccctgggccagagtgcagagcacaggagccggccttctctcagggcaaggaggtcagtggagggggcgagcaggacggccccaggaagatgggcgggctgcacacatgtggatgcagggggcaaagtgggaggcatggggtgaccagctgggcacaagggcacagacaggcaggacccgggatgttcctggggctgggcaggtggggctgcccctgcaatgggcccagcaggggcgatgcctcctgagaggaaaccacatctggaaatgggaggcttggggaacggggctgtcagcagccacgcccctcctggggcgggaggaggggagctcagggtgtgctggggcgggcagagaagtgggttcctgcctggggtgggcaaagatccttgtcccacccacaccccggccgtggtgctgccaccccctgagaccctgacctagttacccccttccctgaccccactgcaaagggtcaggtggctttcatctgaggaagggacatcgggcatcagctggagatgtctgctatgggcaagacagtggggggggcggggcggatcctggggccgctcagaaacctggaggggagtcacccacttttcctgtgtccatgggatgggcgggaggtgagggagcagccgctggaagtaacagtcgcacgctcactgccgactggccaagcccagcgccggcgtttacttcacctcagggaccctgcagtgggcagcagtgaccctcacagagaagctgggaaagctgctggtgacacacagctgggatcagccctgggctggtgggacccctcacagagaagccgggaaagcttctggtgacacacagctgggatcagcccagggctggtgcgacaccctggactcccggccaggaaggcacggaggagggcatgggtgtggccgggccggggtgggggctcagcctttggtcaccaggggcgtgatcatctgtgggaaggcgtagtagcggcagtcggccggtgggaccagcgccatcacctccgtacggatgttctccctccggaagccggcctccagcagcgcgggcacctgcgtctcctggtcggggatggcaccaggtcacctctgagggccatgggggtcacgtgcaccctggcgcccacccctcattgaagagtgtttacagatggcaaggcccgggtgggcggctgcagctcccgtgggcacgtggcagggcagccctggaagcccaggtgtgaacgggaatctccagctccccagtgcgggcagcagcttcccggctgtcctggaaccccagccccacactcgagccacccccgggcacctactccacagttctccagaccttgccagtgtggcgggtggagccaaagaatcacaccagaaaaagaacacaggccactagttcccattttggaagaaaagctgccccaggggccacaggcacccagccggctctcacaacagcagcccagggcaaccacatagagcccttctcagataggccgcctccaccaggcagagggaacagcgagacaagcactgctgaaccagcaaagacagccaggtggaggcagctggagggaggggaacacgcagggcttaggctgaaccacagggcactggggagccatgggaggttgttgagctggtgagggactttgatttccattttttttgtttttgttttgttgagatggagtctcggtctgttgcccaggctggagtacaacggtgcaatctcggctcacagcaacctccgcctcccatgttcaagtgattctcatgcctcagcctcccgagtagctggaattacaggcgcccgccaccacgcctggctaacttttgtatttttagtagagatgggattctgccatgttggccaggctaggctcaaactcctgggctcaagtgatccacccgccttggccttccgaagtgccgggatcacaggtgtgagccaccacgcccagcctgatttccattttttttttaaattttctttctttctttctttctttcttttttcttgagacagggtctggctctgttacccaggctggagtgcagtggttcgatctgggctcactgcaacctctgcccctggggcccaagcaatcctcctacctcagcctcccaagtagctgggagtacaggcacacgccaccacgcccagctagttttttgtattttttttttttaggaaagatgaggtcttgctctgtagcccaggctggtcttgaactcctaggctcaagcaatctgcccacctcggccttccacagtgctgggattatagacctgagccactgctcctggcagccactgcgccaggcaaaggactttgatttctaaatgaaccagcacagtccagcccacccagggggtcaggaagggaccctccccaggtagcaaggtggctccagcagccccttcccacccccatccaaggtcacttcctggagacccatggggaacttcaggtgggcgcacctcaaacatgatggtgatgtctgagtacttggacttcatcagctccccccaggaggtgaggttgcagtaggtgaggacgccccccggcttcagcaggcgaaaggcgtggttctgtggaaggggagtggccagtggtcaggacggaggtgggggtgtgggcagaggggcttccccgagggcctcccgcatcccagcaagtcagagagaaccaccttgatgaagttgaactggtgtgtgtgccaggtctcctccgagagtgggtacgtgtcgtacaggatccctgcacggagaacagaagcccacgcggtcagggccgggctcagcgcctcacccagcctcacccggctcatcccccagcgggtggaggtgcagtgagacggggccgtgggtagaggtggggctcccacacaggcttgagaaccccgagatcgcctccagggcccctccgtgagcatgcccatccccggtgctccgccatcccacagccaggcccacacccacttgggctctgtccccccagtgcacatcagagggacccccacaagcaaaggaggggctgcattggagctggggaggcccaccctgtgatacgtcccctcacccctcaccatcaaagtgaccgtcaggcagggtgggtgccacatcctcccacaggcctttcaaggggatgaccttgcagaggggaaaagaaaaagagaggacagggtagagaggtccccaggatctccccacctgcagaaagggagcggccagggggactcccgagagagaagaccacctcctccacctctgacagccccaggcccccaacccccaggaagcagtgccctcaccccaaggagtgggggtcctggagggcctgcgggcagaggggcaccttgtgtgtctgccgtggggcccagtcccggagccgctggaagacgccgtcattgcactcgatgatccaatgctcatcaatgggcgcctcctgcacctttgacgctgcgatggccatgccaaagcccacctccaggacccggccccctgggcagacacagggcgcctggcatcactaggtggggcgggcttaggaggctgcctggaggaggggcacagggcagggcagggctggggagactgcctggaggagggggcgcagggctgggctgggggtctgcctggaggggggcgtgcagagcagggctggagaggctgcctggaggagggggtgtggggcaatgctggggaggctgcctggaggagggggtgcggggcagggctggagaggctgccaggaggaggggatgcagggctggggaggctgtctggaagagggggtgcagagcagggctggggaggcttcctggaggagggggcacagggtagggcagggctgagctgggggtctgcttggaggagggggtgcagggctgaactaggctatgtgagtcacatttgccacaggacgggagggcaccctgggccagcatggacagaggcgggcggaacacagtagtcctgagcgggaacagcgtgggccctggccagcggccagagagaggatgaccagccagggaggccgaagacggccgcttttggggccaggcctgtggggaggcgagagccttggactttgagcccagcccacgctgtttgtcccgggtcccttatctctcgggttagttacttttctctccccctccctctatccgaaagttggatttgcaagagtggccaggcaagacctggacttgagactatctgggaggggaaggactggtccccagtgggccacacatgggccccccgctcaatcctgattggcactggacactggacgtgcccattttcagggtgggaacactgaggcccgacccctggacggggcctgtgtggggccagggagtcctttcttagcagcccttagcgtctgacgccaggcaggccagggccaccccggggacagctgtctccctgagctcagctttccgagtgctattcttagccgggcgagtcggggctgctctcccaggcaggcagaagggcagcctctccctggcacgaccccttcctcccgacctcagacagggagctggggacccggttccacccagtttcacccaggtctcacgtttgaggtccccatctggagagcggggggcctcactccccctggagaggaagtttctggtacttaggcggtgcctaacgtgtgcgggccccacgcctgccgcactccccgtgaacgcctccgtgtgcccccacctgcagccccacttcccaggcgaggagacagaggcgccccggcgggagggtgggctgcagagtccccgggtcggggcagccccggcctcagtttcccctgcgcccccgggggcggtgcaggccgggcgggggctacctttggaggaggcggcggcggccagcgcgtgcatatagggggtctcccagcgctccatcaccggcttgcccaggatgcgcaggtgcgtgtccgctgcgtcgtaggccgcgggcgccgccccccacgcggggctgcagttctcgccgggcgcgaagatgggggtcgcgctgggggcgctcatgctgcaggctggacggcgacccgacctcgatcgcgcgccgcccgggcccgctccctgcaggggcttgtgggccgggggcgggtccaacaggcccggggggcggacccgcgagaggacgcgcgcgcgcggctccgggagcggcctctagcggcggccacgcgagaggtggcgggagtggggtcggggccccggccgccccctccccaaggagcctcggtgccccctctgcggagcgggcaccgcagccccgcgcccggggacgcgaacctgcaggctggggactggaatccccgccttgccgcttacgcgccatagattcctcatctgtcagcaccgcagaaaggccccctcctcgctggggtgtgagaatctgaggatcttccaggcgctgttggaagtgctttaagtgtttaaaatcatttaatcttcagaagatgctacagtgagttctgtctttttttaatagagacggggtcttgctatgttgcccaggttggtctcaaactcctgggcgcaagcgatcctcccgcttcagcctcccaaagtgttgggattacaggcgtgagccaccgcgcccgccaggttctatgatgactgtcgtttttccttccttccttccttcctttcttttttgaaagcaagtttattaaggaataaaaatgaatggctactccatagagcagccgactgtcattttacagatgtggaaactgaggctttgagaagcaaagccggtggtctggtggccacgagggtggggacccagcattagagctctgatgcccccctttcatgagcccatgtcacacccccataggctgggggtcatctgagaccccgggtccctaatgggggattccgcccaaagacgcctccagttctggagaccaggactcaatcccagcagtgccctttcctccggcggccctgcagctggggtgtgcgggggtggaattaggcctcccccagcccagggtagccccttagggtcaagcacaccccccgcctgtttcctgggggcccccaagcccgctgcggtggcgtcctggctctgatagccggtttccttccccctctgaacgtggggccacagtcatgagccctgagcactgcctgcctgcctgcctgcctgcctgccgtgcgttctgcacgggttaacagatgcagttattatgcccatttaacacgagggaaactgaggcccagagaggttgaggttcacaggttgcagcagggccacggtgtgaacgcaggcagcctcggaaacagctcccgcgcgcggccttccctgcgccaccttgtctgggtagctgcctgccccatcactgcctgctcaacgcctccacatgcccctgccacctcttgcacagctccttagccccgggccttggcacacgctcttccccttgcccagacagcctctctcctggtcaggccgctttctcgttctgtctcaagctgagcccacgtgtcctctaggagacacccccattctgccccaggacaggcatgtcctggtcagaagctgttttgtttgtttttgtttttctgagacagagtctcactctgttgctcaggttggagtgcagtggcatgattttggctcagtgcaacctctgcctcccgggttcaagcgattctcctacctcagcctcctgggtagctgtgatgacaggcgcccgccaccaagcccggctaattttttttttttttttttttttttgtatttttagtagaaacggggtttcaccatgttagccaggatggtcttgatctcctgacctcgtgattcacccgcctcggcctcctaaagtgctgggattgcaaggtgtgagccaccgcacccacccggccagaagctgttttctctctctttggtagttcactaacggaaggtatttcttcatggtcctagcgtccctctcacagggctgtcagtgatcctggcacacagaacatgcttgataggctgggtgcagcagctcccacctgtgatcccagtgcctgggggaggtgcaggggctcaggcctgtgatcccaccactttgggatgccgaggtagaaggattgcttcagtgcaagagttaagaccagcttagaccacacacagagaccttgtctctacaaaaaaaaaaaagttttaaaaattagccagggccgggcgcggtggctcacgcgtgtaatcccagcactttgggaggctgaggtgggcggatcccctgagaccagcctggcaacacggtgaaaccccatgtctacaaaaatacaaaaatagctgggcgtggtggtgggtgcctgtaatcccagctactcaggaggctgaggcaggagaatcgcttgaacccgggaggcggaggttgcagagaacatcactctcagtgaaataagccagtcgcaacaggacaaatcctatgtgagtccactcctaggaggtccctggagtcctccgatccacagagacagaacgtaggatggcggggggggggggtgccaggggctggggaggggacagggagtgagtatttcacggggcagagtttcagtttgggaagatgagaaggttctggagaggacggcggtgatggttgcacaacaatgggaatgcgcttaatgccaatgagctgtgcacctacaaataattaaaatggggccgggcgtggcggctcacgcctgtcatcccagcactttgggaggccaaggcgggcagatcacctgaggtcaggagttcgagaccagcctcaacatggagaaaccccgtctctactaaaaatacaaaattagccgggcgtggtggtgcgtgcctgtagtcccggctattcgggaggctgaggcagaattacttgaacctgggaggcggaggttgtggtgagccgagatcgagccattgcactccagcctgggcaacaagagagaaactccatctcaaaataaataaataaaataaaaacaaaaataattaaaatggaaaattttatgtcacatatattttaccacaagaaaaaaaggggaccaaaactacataccgtgtgttggatctgtttatagtcacactgggagtaaattcagatcagtatctgcacagcctttttctcgctgcctttgccctggagtggaaggaaggaaatgaatggggaagagggagaagcggagaagtagcctcttctagttctttcttccttccttttttttctttttcttttcttttcttttttttgaggtggggtctcgcactgtagcccaggctggagtgcagtggcgcgatctcggctcactgcaacctgcacctctcatgatcaagcgattctcctgccccagcctcctgagtagctgggattacaggcatccgccaccacacctggcttttttttttttttttgagatggagtcttgcactgtcgcccaggctggagtgcaatggtgtgatctcggctcgctacaacctctgcctcccgggttcaagcgactctcctgcctcagccccctgagtagctgggattacaggcacccgccaccacgcctgcctaatttttgtatttttagtacagacagggtctcg[143 bp omitted]gacttccttctttgggccacattctgtgcatttcatccacccactgcttcattgttcatttatccagtcaccaatagatggatgtgtggttatttcaaatgttccagtcttgttttgttttgtttttgatagaaacagggtcttgccatgttggccaggctggtctcgaactcctgacctcaggtgacccgcccacctcggcctcccaaattgctgggatcacatgtgtgagccactgagcccagattttttttttttttttggcagggtttggctccgtggcccaggctggagtgcagtagtgcgatgtcggctcactgaaacctccaactcctgagctccagccatcctcctgcctcagcctccaagtagctaggactgcaggtgcgtgccaccaaacctggctgatttttgtattattattattattattattttttgtagagatggggttttgtcatgttggccaggctggtcttgaactcctgggctcaagcgatcctctcatctcagccttccaaggtgctgggattacaggcatgagccactgcatccggccagttttattttaaatggggttttagtcccagctacttgggaggctgaggagggaggatagctggagtccaggagttcaaggctgcagtgagctatgactgcatcattgcactccagcttgggcaacagagtgagagcctgtctcaaaataaaagaaaaaaaagtgttttgtactatttgtctgtgatcttgttccttgtattttttttttttgagacagagtcttgccgtgtcgcccaggctggagtgtagtggcacgatctcggctcactgcaagctctgcctcctgggttcaagcaattctactgcctcagcctcctgagtagctgggactacaggcgcctgccac[138 bp omitted]ctcggcccttttttttctaagagggagtcttgctctgttgcccaggttggtgtgcagtggcgcgatctcggctcactgcaacctctacttcctgccttcaagcatttctccggccttagctt[131 bp omitted]ggcctcccaaagtgttgggattataggcgtgcgccacctcacccggccttgttccttgtatttatttaattctgtgatgatgaataaaccaaacgatcaggctgtcaatgtgctgtgagattaaggagaaaagcagtaggcagcacgtacccggttttacaaaaccctgcgggtcacctgtttactaccgtcagcctagaccggtttttccacctccttctgctgacattggaggacgggtatcattctttttggggggtcgtcgtgtgcactgcagggtgctgagcggcatgtctggtctggacccactcgatgccagcagcaccccgcactcaagttgtgacaaccaaaaccgtgttttcagacattgccaagttatcccctagggggcaaagtcacccagaagaagaaccactgatgtatgcaattaacagatgcaactaaaacagtatttggctattaatagtaatagcacttggggggggggtcaataatatcttttcatagtcattgaatttagttaattgttttgatttgattccagttcagccccgaactgggtgaccttggccaagtgactcagcctctcggaccctcgggatcctcttctgtgaaatgcggacaggggaaggagcctcgcgcgggacgctcacgtgccgttcccgctccgtccgcccgcctggggtgcgggcgggtacactcccactccccgcagcgccccacgcggctccaccgcttccgagtgaagagttaaagaggaagcggcagccgcgcctgcgcccacagtgcctagcccggagcgccggtctcgcaagcgcgcacgcgcacgcaagcccgcacgcgcgcgcacgcacgcacgtggctcggcccgcgcgcatcctccccttgcaggggcggggccagcgcagggactccatttcccagcgtgccccgcggcaacgccaggagcctccgaggagaaaggaaaacgcgcgacggccccgactgcggcggcgcgaaatccgcctcagggacgcacgcacagacggagtacccctggacccgcccccggagaccccgtgcgggagcgcgcccgggcgtgcgcaggggcggcggcgcggcggcgcggggacgcgcggtgaccgttggcgccgaggggaggaggcagccgccgccgccgccgccgccgccgccgccgccgccgccgccgttgcgcagatccgggccgcggctgtggggagggcgacggagcgggtgaccttccggaggcgggagcgagcgaggaggcccgggagcgccgagcgtcgccgccgccgccgccatgaacaactcgggcgccgacgagatcgggtgaggacgagcggcgcgggcctgcgtctccgccccgagcccggcccgccgctccccgccgcccggcctcagacgccgccccccggggccgccccgtcaaggtcacgccggccgggggcggactcgggacccggactcgccgcggcttcgcgccgggggccctggacgggtgcccggggtctgggggggtcctggcgcccccgccgccgcttcccggcttcccgtcctgggggatcctgaaggagagcctgaggggtccggggggccccgccgccgcctccagacttcctggtcgggggaaccccgaacggcaacctgggggggtgtcctggggcgcccgtgccgccgcttcccgactgcgcgtcctgagggaccccgaatgggagccagaggggttcaggggcccccgccgccgcttcctggttgtggcggccccgaacgggaacttgggggggtctggagcgtccccgttgccgcctgtagggcttcctggcctgggggaccccgaatgagaacctgagggagtctgcggggagtccagggcgccgtcgccgccgcctcccggcttcctggccagggggaccccaaactgtggcgtggggggtggtccggggcgcccccagcgcgcgcccaaacttggcgggcggcgcacgtggcgagccgaggcgagggttccggttctgccaccgcccaacctatcccactcggggctccgggctccccgctcccatcccacccccccaaagtggtaaggtcgggaggggttcgcaaacccagggcccagggggctcgggtcagccggggcctgctgtgtttacgttgcctcggcgcctccccgccgggggtgggcttgagctgcggaagggagagtcagcgcttccgaggcggcgacgggcccgcggatctttgctgcgccgaggcgtcccctcctataggagcctgacctgctccggaccccgcggggccgggaaacctcatttcgctgtgccccagggctcggcgccattctttggtaggagcggctcctgccgcagcgacgtcgttttagagttgcattcttccggcaaaacagtctgggttgggtttcctagtggtctggtgtaaatttctcggtgcccttagctttgagcagcgccctgtgttctcagcgctgggcttggctagtgcgggagcggttgctgctagagggttgccttggcaggcgcctctcgcaccagctacaggtcacacttgtggatgggaaatgccttttgtgggctctccccctccccagacaaaacaaaagagcaccttccgttggagaaccaggatgaaagcacttagcccctgcctagcccgtgctgtgagtcctctccaggcactttgacttggcagggtccgtgtgcctgtgtgagggacattgcagggatgggcctgagcagggagtccaccggccatgggggatggagccatcgactttggggtgaggcagggaaagggctcccagatggggtacctggattaggtccattcaagccgcgggtgaacgtgggcccgctccacccaagccgtggctgtgaggaggctggagagaggtgagggctcctgtcccctccctgcatggacacccttgggaagtggggcagctggggtcccagcctgggtctggaggggtcccacccacagcacaaataggctcgcaggccacccggacgccacgggctgcgtggaggagaactggagtgcatggaccctgctctcctccccggctgccaggagtgtccactgctttctaagtcagactccttgggcaagaagtgttgccacagccgcccgtcgcatgggagaccggcttccattctatgcggagtccacggtctgctctgatcttgctgtgtggagttgttgtgtgcgtgaaatgcttgtgaccctgcgaagcgccctcctggcaagtcccctgcaggtgcggtgggtgccatgcaggagggtgctgagcttggatggaagcaggccctctctgcggcagatggcggctctcaggacgccatgggtctgcggtgtcccttacccactgggggggctcggcagcctgaggagctccctcttcctgatgcagagccctcactgctcactgccatggaggaggcaggagatcccgccggaccccgcttggagggctgggcctggagcatgcatgggtgcggggtcaacgcctcaggagacttggagcttgggagccccctgttctgggacacttgtggccgtccagctgctgccctgggaatccacacctggaaggtgggttagggagccatccttgggggaagctctgcttttgagtctgagaagtcgtcccaagttttgagggtccctgtgctggcttagaagtccatgtaaagcttgatgggggatgaaagtcagctgaggcctgccggtgataacggatgccttacacacaccgacttccagtcagcttgaggggggcttcatgcaggaggaagcgcatacgtgtggtggggtgtggggagtccctctctggatcctggtgggtttggcacgcggaccctacatggtggatgtgatggacagtgtcctcctttgggagcggggcctgtcctggtcctcttgtgaagggtgggggacaggcactgacctgtcaggagggttagagggttggcaccagcaggtggcctggagcgctcagagcacgcgcgatcaggaaggcccgagtctccagtgtgccctccctggccttgtgaagtcatcttaaagtctggcttgagcgcctctgacttggattctgggaagctgacacagcgcggccggggtcgccacatcctgttgagtagccgctgggtgctaggcgcctgggtggtagaccaggtgtcagggatagggcccatgcctggcctactggggagaggacagaggctcagaggggtcacctcgagcgcccaggccattgtgttctgctggcttccaaggcagcacacggtcatggaactggagagagaggtttatggaagattttatctggtacactggggaatggtaagacagggacacctggaaatattgtaggaaagtcacagagggaggaaggactcagcggagagaggagaaagccgcctctgggcagcttcgaggatacccaggactgtggccgggggccatgcagctcagagccaggcccatggcaggtctctgggtttattgggtggctgtggaaggagacatcctgagtggggctcctggctgggcccctagaggccgtgactacttgtacctgtgcagagtgagcacaaggcacctggcaagattgttggtcaggccagagagggccgtgatctgggggaggctgttgcagtgcggggagtgatagggaacctcatggggccgtgccggcctttctggggctctcttggtgcatttggagttattccgaggcaggtctcctgggctctgtcagcactctggcctggatcactctggggcaccgtgggcactgcagggtgctgggcagcacctttggcctccattcactccgggtcaggagtacccccagtcgtgacaaccacaaatgttcccagacatcacccagtgtcctgctggggggagagccactgtctgggagcatctgtgcttttggcctggttgcccctgcgctgggggccgctgctccttgtggtttatggcttgtcctgtgtcggctcctttgattcctgtgaatgggccttgagggtggatgtgctcctgactggctcgccttggctccaatggtctggagcaggccggtgtctagaaaggcagcagcatggaccctggcgcttgcccttcacacagcagctccccagtggcccagagctagcagcagcgcgcagcgtgcccagctgtgcttgtagccttggctctaacccttggctttgccagagagactgaggcacagaggagttgagggatgggcccggggtcaccccagggggtggaagatccggagctgggagtccacactcctccactgcccgccccgcacagagggcgctcctggtcaggcggctatgttcatggtgcgacccgtcaatctgaggttgtgctgtcttctgtgaactgaggccttttcccatccaggcctggtccccgtgacaccatgtcatgatgtcagaatccctgagagctgtgacagggcttttggcagaggccagtcattcgacagatgcttataggctgagcttccagcttggctccaggcgttgccaaggagaacactggtccgcctgggagggcggggctggcagggagaggatgagggtgaccacagttagcacccaggatgtgggcattcaggggctccttcagcacacagcagcgcgttccagttcacggaccgctcctgtgttctgtggaccccacaccctgcaggcgtgggctggagggggggcatctgaccctgctggggagagggagtccaggctatggaggggcgggctgggctcactggcctgaggcagtgggtgaagtggtcctggtttcccacctggtcttaggggcaggaaagtccctagaggctcttcctgatgctctggaagaagagaagggttccccacacatcagccgccactgggcctggacttctgcctcttgagattgtgcacggagctgagtgtgactggcggagcccagagccaggtggggtctgtggggaggcaggctcctcctggcttggtcccccggcccagcaggaagggaaaggtcgcctgccaactgcccccattgaggctgctggccccgaatggccgggctggccgccggtttttgaagcccactctggtgctgccaggaggtcagggctctttgtggtcagcctaggccagaggaagcctctgcagatggactttacgcataaataccgcacaggcacccgaatggcacgcagcaagcgaggttgccatccaaaacggcttttgctttaacaggcagaagagggtggctgcgccggccaccgtggattgagcacctgccaggtgtcgagctgcaggccctgggtgccaggcttgcagatcctgggagatgttcatcatgacctttgatgggcagactgcacgctggactccaggttgcaagggaagaagtggagctcgtcccacgcctcccccactaatgagaacaccccttttgggtttgtggggtgtgaggtctgtaggagccacgacttccagtgtcggagatgccgtcagctgggtgatgactctcccacccagcgggcccctcagaggcagggtgcaggagccacattgctcaccgaccccttcatctgcgtaggccagtgttgccttgccccgttaacgtcctcagtccacacgccgccagccaaggtgcaggctgagcaagcctggagctgaggacaagcggaccgccagccccgtagcaagcccacgagagccagcagctcctccttttggcctctgcccgcgcccggcttcctggactccgacgtttacttgtgtgagagttggttctgctgcctgggcagttgatggacagtgtctgggaggtgcctgcccagggctccgcatgtttctgatgtgccggcttctcactcacgacctggtgaggttggcagccaggagctttcttattttattgattaaaacatcctgagattcagaagtagggactttgtgccagggccctggaggcagtccctgccactgaagagatgaccctgctttccgggacttcccggaggcttctgtctgtagaccagggagaaggtgttcgccggtggctcctgagtggtagtaaaagacacatggacacaggaagctttagcgttagaagctgctctcaaatatctcaacagaaacacacagtgtggccgcgcgcggtgcctcacgcctgtcatcctagcactttgggaggccgaggcgggcgggtcacctgcggtggggagctccagacacagctatgtgaaacgaaagctatctgttgctgtctcagattccataaggactgagacttgtttcaaaagaaactgaaattctgtcttgttctcagtaatgaaagtcttttataccataattgtatatataacttctgacttacaggaaaattacaaaaattcccatatcctcttggccctgccagactcaccattggctgacattttaccctttggcacgtggtgcctcttgccccacccccagtgaactgtgtgtgtgtgtgtgtgtgtgtgtgtgtgtgtgtgtgtgtgtttagatggaccctcactctgtcgcccaggctggagtgcagtggcttgatcttggctcagtgcaacctccgcctcccgggttcaagcagtacacctcgagctcagcctcccgagtggctaggattacaggtgcgcaccaccgagcccagctaatttttgtatttttagtagagatggggttttgccatgttggccaggctggtctcgaactcctgacctcaggtgatccgcccacctcagccttgcaaagtgctgggattacaggcgtgagccagtgcacccatccccactgtgtgtgtttctactgaaatatttgagagtagctggagaccgatgcagtcccctttatgtgtacactgagatatctattgtttcccaagaacaatgacattctctcacatgaacacagcacagtgatcaaaattgagaaagtggccgggcgcagctactcacgcctgtcatcccagcactttgagaggc[134 bp omitted]gaatcgcttgaacccgggaggcggaggttgcagtgagctgagatcgcgccactacactccagcctgggcaacacagcgagacaatttttcaaaaaaaaattgagaaagtatttattattttttaaaattgtatttgagtattttttatttttttaattttatttaagagtattttttattttttttttaattttatttaagagatgagatctctgtcacccctgctggagtgcagtgacacaatcacggctcactgcagcctcgaccttgactcaaacgatccttctgcctcagcctcccaagtagctgggactacaggtgcctgccaccacctggagtctcgttacgttgcccaggctggtcttgaactcctggcctcccgtaatgctgtgattataggcgtgatctgcgcccagctgagaaagacagtactgataccaggttatctaacccccccggccctgtttcaggtttctcagctgagcgtttctagcccttcccccttaatacacaatttttgaaatttaaatgaagaccgaaactggactggtctgacgagttccttctgccagtgaggtgggggtggagggggtactgggctgcttggaggacacctgcctgttacctggctgttgggtgggtgcagtgctgactacaggctgctgtttcttcaagtgacttggatttggtttggttttcagggttttatgtgtgtgtgtgtgtgtgtgtgtgtgtgtgtgtgtgttttgtttttttttttttttttgagaactgcttgaactttaattccaaaggattgtgtaaatgagcatttttccggtcggttccagccaggcttgggggcccttccttcatggggtgggggctgctgctggctcctgctgggtgccgggccctgctggcagggatgtgggcggggctggccctgactcagcgcgggcacagcctatggagagtgaggcacagcctatggagagtgaggcacgcggaggcctcgctcctcccacggtctctaggcctgacctcaacgctccctggcctgattgcgaagggtgcgtgggagacgtaggattttaagttaatgaggcctcaacctaagcctgttgctgttgcgtgatcagcatggttttccctgaaatttgccttttcagatctcgtctctaagggtcaggaagcacagggcggctggcacaccccgcctctaattcttcccgcctcagccctccccaccgaagaacggggctggggggttgcttgttgacgttttgaagacggcagtgggtgcctttcctgtggtgggaacatgctttgtttttcacacactaaatttaaatcagtcgttcttagggaaaaaagaaggaacagggacaagctcctggcggttggctgtggcagacacttcaccaggggctgactcgcgggggctgagtgtacaggccccaggtggtggttgatgagaggtgatgagtgtgccagccaccttgcaggggtctttcctggcgagctggcaggagcagggaggagcacgttgctcctgctgctggtggggcagtaacgtgttcaacctgacagcgacgtttttgctgaaagccgaagccaagggtggtgtggttggccgtcagggatacagggccccgcgtgggaatggtgctttcagtgaggctggcaggattcttgcggctcaggtgggagctttggcctgcacggtgttttgctctctggagaccaagggtgatgatggtgctggcactgagtcacagctgagattcagctcagggacttcatttctgaatgcgtgtcctctttcccagggaaagcaggcaggatgggagagtcgccgatagaaccacctcttccctgcctcctgggcttgggggaagcttgaatgacatctaaggccccgtgcctgggtaagccttgtggtgtctcagacatgcccagtgggtgccatggctgactcaaggtggcacagtccccattgggagttggcacagtccccattgggagttggcacagccaaggccctggggccacctggagcggcagtgaggtggaaaggtgagtgggcccttgggcgtcgctgcagggtcgatggcggacgccttgggagagctccagctcttctgcccggaggagacagccccaggacgggggtggcgcgggtctttggtgggggcaggcaggaagtgccagtgctgagactgaatttcaggcccttctcatctgccaataagagacagccccagaatgggggtggcgcgggtttgtcgggggtaagtaagtggggccagtgctgagactggagcttcagggccttcaccttcatctgtgggcctctcgttagttcgtgagtgcaggctcattgggaggcttctgtctgtgtccccccacccccgccccaggctgtaattcagaggccgtgtggcataggcttctagtttactgtgcatcatttcagatgtagacttctacattctttttcctgattataaaatactcgcaaaagctgtaggaaagcgagcctgtgtcccacttggcagcagtgcaggtgagcgtggtgccgtcaccactggcctgtcccaggaactcatcgcccgccacgcatgaggtcagcgtgcggctctgtggcacggtcctctccccatggcaaggattgggatcatctttcatgtctgcagacagcatgggcgaggctgactcgccattgctgtgagctttgtatgccgtcacgtgcacaaggacgtttgcgtcagctgcttctgtggtttgaattaagacctcagcttggcttggatgggggcatttctaaggcgagcgctgtcttgatcctgaatgttttctcattgaatcgcaggaagctcttcgtgggcggtcttgactggagcacgacccaaggtaggtggggaaggggtgtcaggtgggtactgcagatgggctctaggacctcggccttcaagttgtgtctgcccgcctcttgctactgtcttggatattttaaagtccttttgacgttgttctgatttctgggcaggggacagagtaagtgtgtatttgctctgagactgttaatttggtatttccatcccaagttacagggaagacctcaggctgcaggttcctagctccgggctgaggtggcttgtggaggcagacagctgttgtctggaagtgcagagggctgggggctggccaggctgttactgagttcagaataggaggaaagagtgtgtagcaaagtcggcgctccttggccactgccagcattcagagttgtcttgtttgccttgccttaaacgttgccttcctggacgcctacaaagtcaggttgtaaccgctggccactgctgtgctcactggcagcccctgatttacgtgaggacctcaagtgtgtgttgggcagaattccccagcgcttcccgtacaccccccacccccagtgcagcatcgctcggtgcgtggctggtggactggaggagtgtgcgtgccggcagcactgccaggcacgtgcctaatgctctggccctgtgtgtttgtgttttcttcccgatttctgagcagagactctgcgcagctacttttcccaatatggagaagtcgtagattgtgttatcatgaaagataaaaccaccaaccagtctcgaggctttgggtttgtcaaatttaaagacccaaactgtgtggggacggtgctggccagcagaccgcacacgctagatggccgaaacgtaagtgcccttccgggagctcacacccgctctctgtctcccctgtccttcctctgcttcattttttcctggactctgaccgatgtttgcgttagagtatgtttgaacgtggggtcgattgggaaggattaagccttggtgctgaggctggatattgcaggaggatacagggtgaatggagccggcggggcggggcgggccgggctgctgtgccgtggctgctgttgtgctgacaccctctttcctagagaaacagcctcttattcacaaccagctgatttgaaatttcctgcagatcgaccccaagccatgcacaccccgggggatgcagccggagagaacacggccgaaggaaggatgggtaaggggctgggccgggcggcctccttgtgtgttctccactccacgtggaaaggaaatgcgtgccttcaatctgctgttgtcgctcgttaagattgagggcgacgcaggtcttctgggttggcactcgagcagctgaggatcacccagatttatcagtgccgtgagtgttttacagccaagaaaattcttactaatctatcttagggaaaaaaaaaatgacagctcatgccactgattatcaggagccagtcagcttccctctgtgccctgtgtgccctctgtgccgggcctgccccctcccactgcctggccctcctcagaggtgggccatccttccactgccggggctgggccgggctgtgtcagctcgtgctggccactttactgctccacttgagatcccctgacgtggcaacttgggttctctgacctgcgccctggtgcttgcctggccgacagggcactgtcctggcatggggtctccttggcatttgggtctcaccaccacccacacctcaccttcctccagccctgcagttctcacaccggcaccaggagcctggtggggcggtgcagatgggaaagctcttagccccatagaacgtgctggacagtgcagacctggaggcctgctgaggcaccgggtgccagcctctccacagtgtgggcagcagggtggggtctatatgtatttacatccatctctgtccacatacaccattcctaaggaccggagggtgcgtctcctaaaatgacggccacccctcgcatgcacccaccgtcagcacgctggaaagcggctgcagggaatcccgtgtcatctgtgtccaggccgtgttcccagctccagaattgtttcacaagtgtctctcatagctggtttttttcagactggaatccaaggttcatattccatctggttattaatgtctctctagcttttcttaagatataatgggcacgtagtaaactgcaccacttgatgattctgacccatacaaacactcatgaaaccatcccgaccgtcacggcagcgagcactcaccccacgcacacactcatgaaaccatcccaaccgtcacggcagcgagcactcaccccacgcacacactcgtgaaaccatcccgaccgtcacggcagcgagcactcaccccacgcacacactcatgaaaccatcccgatcgtcaacggcagcgagcactcaccccacgcgcacactcatgaaaccatccctacagtcacggcggcgagcactcaccccacgcgcacactcatgaaaccatccctacagtcacggcggcgagcactcaccccacgcgcacactcatgaaaccatccctacagtcacggcagcgagcactcaccccacgcgcacactcatgaaaccatcccgaacgtcacggcggcgagcactcaccccacgcgcacactcatgaaaccaccccgaacgtcacggcggcgagcactcaccccacgcgcacactcatgaaaccaccccgaacgtcacggcggcgagcactcaccccacgcgcacactcatgaaaccaccccgaacgtcacggcggcgagcactcaccccacgcgcacactcatgaaaccaccccgaacgtcacggcggcgagcactcaccccacgcgcacactcatgaaaccatcccgaccgtcacggcggcgagcactcaccctcaaaggtttatagtcttttattcaaagcagttggaacaacttaaaatgtgatagccttggatagggaaaaaaaaaaaaaaggatggttggtgggtgggggcaggaggagagcagccccagccctaagggcagcccgggagctggaccagagactcctggctctggccacccagtgagcgccgaggccccgggaagtggtgcccaggagcaggcgcccttgccagtgggaggccggcagaaggggctgtgtggtttgggccagtgtttcacacagctcttgagctgctggaggtttccgtagccatcattgtcacctgctggagatgtacagcctgaaatccagcttcctctctgctcatttcgtcgtcgctgctgcctttcccctgccgtcctaaagtccctgccttcacactggagcacttttccacgtggcagtggttgtaattcggaatagctgaggcaaggcacgcactgtgtcgtgggtccgtttagctgaaatgtagctctgcagaaatgctcaatccctgtctccttgggtctctctagaaaagtgagaaagtgtctcagcagagcccagtgtctttggacttagcgggcttgtggagtgttctgctctggctttcagctgactctttaaaccagcgcggattggcctttatgtcctccgcagctcgcgggagggtttggagggttcccgtgtgaactaactatccttcccttcttcaacagcagaaaggacccaggagcgataacagtaaatcaaataagatatttgtcggtggaattcctcacaattgtggtgagacagagctcagggaatacttcaagaagttcggagtggtgagtttctccccaccccggcagcactgtggggacagagccgcttctgctcaggcctgggccttcttggggctggagtggccgagccacaggtgcacgggcctttcaggctgggagctcgctgtctcgtatttccccaacgcctgcgccctccggaaaggtggaaagcccggcctttgccttcatggccatttcgtgtcccagtagggtggttgggcggtgaaccagcctgacagccttcagggcggccgcccgattccattgtgaacaccgtggggtccagtgtcagagaagggcagttacacagaaacggggttcagtgtggcctgggcgagccagccccacagagctgactttccactgggcaggtgggagaatgcccgagctccgttgagcccagtgccagagggagctgggacagccggagggggccggcggggagccctcctagtcacccaaggcaggggcgtgtggtcaccccaaggtcctgctgggactcctgccgtgccccgcaggtcacactccgagccccgccagcaggacagccctgcgtgcctgagtactgcgcacgttcatcaggtggtacctgagggtgccacgggcctgggccaggaatgagaggcctgagcggggcctggaagagcagggtctgcagaggagctgtgtgtggctgccccgccacttcgagtgagggccgagcgtgccctttgcttcccgcgtttgggtgggaagggcttctgtggggtctcctggctcccacgtcccctgctaggatgcgtggtcggcgttgttggcccttcatgtccgtcagcacacacgtgagcggggccacgggcagcccggaggcgggtatccagacgcctgccctggagctgcttctccctgcctgcgtctggccctgggagtgttggggctccagcctttctcagacagcagccccacggagcagctgttgcccgtgcacctcccccgctcagggagggcgcaccctgtgcgagagtttgggttcgtgggaacaggctgtgccctcggaagaccacctgtggtgctggccctggtgtccgtgctgacgccaccctctccttccaggtcacggaggtagtcatgatctatgacgccgagaagcagaggccccgaggtaagggcagatctagtttgacctcggccttctccctgctcctccctcagatggcaaactatctcacccgccaggcacacacaggtggcggctgtagcaaacagcctcaggaagggacgatttggagacaaatgactaaaacgtgggctcctcatgtgcaccccattcagcctgtctgtgcttcccgaggtcagacgtcacacattgttttttggcttgttcttttgaagtttttacgacttgtcatgagtctcggcctggcttctgtttttcactgtccggaagagtgtggtccttctgcatttgaccttccttcaccctcatccagtcctcccagtgtggccggtctcatttcgtgtcgtcagctgggtcagctggctcggtgtggagtttggattttccgtgatccatcccatgctttttttttctttctttcttttttccttttcttttctttttcttttttttcagttttctcccctctctgaagtcagcagggcaggtgggaggaggggtgaggagtcacctcagggcctcccctcattttccctcagcttcttgcacacccatccatgctggtttgtggagctgggacgatgggcgcccagtttctgtgccccttttccgtggctgctgctgtctgtcccgcccgcccgcatggttttggttcatcagctgcttttggccggccacgtgagcagacctgcagcctgggtctgcccgccacgtccgtgccgcccccgcaccaccggcccaggtcagtcggggcagccccgagcgccaggtggcgccgcagcatgcccaccatgctggagcatagtttgccatttgaacctccctccccacggttaggagtgctcctcctccatgtcggttacgctgttaagtcttagtcgtaacttaatttagacatacatgcttagtgacgtacttaagtgtttcatagtaaagtacagtgatgttaagtaagctgtttttccttttctctctgtgaattgtgtgtgattaacgatatctctttagatttctcttctccaggtgctaaattatatcacacaggtacaggccagtcccgcagtcagaggagggagcggctttgctccagtggggtgtaaacgaagtttcaggtgtttctgtcccgcttcctcagtggtgatgtcgcctcttgacagccgcattcctagacagcgctcagggcgcctcccccaggacccagcgcctcttgcactgtgcccggaccaggcgagccctgtggtttcagacactcctgcagtttgcgaaaatgtctacttctaaatacgttgtttcatcaccgatgctgtgttccaatactgcctctgatcttgggaaacttgagcgcgcgggaatctgagggttgcttctagatcctcccggtccccctccggctgcccagagctggcgccccttctcctcgcgtcctgtcctgtcccgtgtggacgggacgtggcgagtgtcgctgagtccacactggtgtacagagcacttcggggccagcacgtggccacatgtccttagctgttgggctttgaaagtgtcccttgggtgtcaggcgagtggagggccggagagacgctgcggcgctgcttagcgggtcctcccagagagtgtgtccccttcccttggcctttctgcatcttctgagacgggtctgtgtccccctccccgccacctcctccctcttcctctccactgactgaaggtcatggccatgtccctgtcagggaccccgcctgtgtctcgggcacacagtgtctgtgcgggtccctgcttggccctcccacgtctaccctcggcccgcccgctccagccgctgcctcgttcgcctctcagtcccctcaggtcttctccatcctgcgctcctctcgctgtgtgccttgccttcctggtccctcctcctcttcctcctcctcttccccctccccctcctcctccccctccccctcccccctccccctccgtctggttgcagacactgcgtgcacagtcacgctcaggtgcacacgtgtgctcaggacggtgggaggctcctgaaccacagtgacctttgtcccctcacagtctgagctgccctttctgccccgtttccatctttccccgcccccagttttgcttgtcctgtttctgcctggtcccagctacagcagccctggcccctgtctcttcagcttgagaggccccacagtaggctgctccttccgggggccgttgcctgttcccaccccccacggcccttctctgccgcgctcgttcacgcctcacgcccgtgctgcgctgtcccctgctgtgtggtgccttgtcacgcaccctgtgcctctggcgcgggcagcccatcttcagcccggtctcagctcttcccatgtccatctttgttctgtgaggtcttgggcagctgtctgccgggcacttccatctggggaggggctggtgccgcctgggccccgcctcgggaggacggtgtgctttgcggtgtcacgctccacctagccggggaggcctggagagcccggcgcactcctgcgcctagaggaggagacccgccccgttagccgggggccgcgcccaccccagacccactaaacttcgtttatactgccactcttgtgtttgggaaatgctaaattttttttgcctttaaaattttctgttttgatcccatggtgcatctcgctcttgctgctggcagcagagtctgacctgctggaacccgttgtggcctgtatctttgtgcattgtttctctacctgtatagaacatgcatagatgtctacgatatgacctcttctaggactccttgggcttacccaacggtgttgcgtaagcctagcgaggcaccagctatgatagatactgtatctgttaacgctttagaacgatatatggctgctgtcagcactagctgcaaagcaaattgcaagccaagggggagaatcctgggtttcagagaagcatacacacatccacggtgcacacccctgactaagatggcgcattccacgcgggcccccggcctgcagggttcactggcaatctccccacaggcgagagccagaatattcaagcacgggcctctgaccctcccctggggggcgctttgtctgccagtagcgatggaggccctcaccgttcccctgtctccgctgctgttttataagatgtgctccttgttccaaatctttgtgacacggagccccagcccggggtgtctggggcggaggcttgactcaggcctcagtcagcagagccgtcaccgggagtgcggacgtcaccgtctgtccactccgtgtgcagtcgagtggtggctcctggggagggaggcagctgccccaggggcccgcagcgccccacacacagcttagctgaaacccaaggtcgatccctcggcccgtccctaatactgttcatcatcctgttttgtgtcacaacaccctgctaccttgattcactcttcgtcgttggctaggttttggatttattactttcgaggacgaacaatcagtggaccaggctgtcaacatgcattttcacgacatcatgggcaaaaaagtgtgtagttgtagttttattttaccttaagaccaaaccaagtcttaggcaacttaggggtttcactggaaaggaacattccttcacggaaagggtcgggcgagttcgtcctgtgaacctttgctgcgtgaggtgggcctgggtctgtagacgtgaggagggtcccatccttccccagcacccttcctgcggggtggggatctctcagctttgctcctggagcccctccctctgggtgacctgggactgggcgggtagggggctggggctgggaggctgtggcggtgttggggctggctccagtgaaaccgcagcgttgcctcaggcttggtttccacgaccactccttcagatgtctgcaaatccccattgtctgacactgacctgtaatgtgatcagcaagggacctttgagagccgaggttccgcttaaaatggaaagcacagtggaaacatcatgaaggactggttgtttgaattgggtcacttactgtggaactccggcaccagccacatgctctcggtagtactcagccaccatgcagtcaagtgacctctggttgtgtcatcttcatactgtgttacccccggaggtgagagggacaggaggccacccccccaacccccaggccagcccttggaaggcatgtgtcagaaaggggtccctaaatccttgttttacctggacccttggaggttcttgagaagtggactctgaaataaataactggtagaaattctacagtgtggaatttcttgcagttagcaaaagcttaggggtccaggtttttgcaggattcctgtcttggtcctttcaaaccaaggagctctgctggctctgccaggccgcctcacatgcccagtgggattctgacccggcctccttggtgcggcagcttctcccgttaacggaagaagacgcttagcccctctgacagggccatggttgttttttcaattaaaatgtcctggagggagcatcgtgctcattatctcctgcccctgccctctaccccagccagaggtcttgatagcagaacttttttaaaaacagtagcatgtgtagttatttttgtatacacgtggcttagattgggttgcagacttcattaattccatttgaacccaactaaaacaggagacacaatccttgttctgacatcgagtgcagcttgtggtttaaaatgagcctgccggctgcatgggtgcgcgacagtacaagcagggcttcaaggagtctgcgcccagtgttttaagggactacgacactgacaatttggggaaagcgtggtcttgatatacggggcagaaagagctctgtacagtgcacacacctgctgccgtccctgggcagcccctgggtccccccagccatgactgttctgcgcgagctcctgagctgggcgacctcagtgtgggtctcgccttccaagccagacagtcgttggagtccagcttgcccggcgccggccttcactggttggctggagcggcacttggcgtcgccgccggcccctcatgggggttttccgtttgtggagtgtttggtaccgcgtggtagttaaccctccatgccaggcgactgcattgctgcattcaggtaggaaagggtgaaagaatttttttttgtttttgtttttttaaagtacaaggaccgctctgctttgtaagcaggaaccgcagtcccctgaggagggtgtgtgaagactcgctcatttgagttctttgaaatgggtcccttggtcctgctgtcacattgccttgagctaacggatcctgttcccatcataggccggtccttggggcattgggcaggtgggggctttgtgcctctgtggctgctgctgtctgttctctaacaggcagaactgagggattctgaactcaggatgtgcagctctccagactgagaccccaaggctgactccaggtggatccattgtctctttattctcattacgatttatcagaaaagtgagacaaattcaggattctcaaatgctgaggcagccccggaattggggggatctttctgttgttagtccacccatattttcaagcaggcattaaaggaaggtcagccactgcgcctagaataagtaggtcaggcctgctccatccattgtccccggccccgcaccctcctcctgagaagactgtggctcctgacacgtctagagaggaagggccccgggctgctgagcgaacacagtatgaagattgcttactgatccaaatgtccattttattgcatgtttgttactttttttgttagatgtaatgtaagattctcttatcacatccattccctctgacattagttttgagttaattgagattctttaagcgttagcctggggaaggtaagtctttatcttccattagacattttaaatttaaaaatctaagtaaaacaccagccgtgtttctcaggtatgagttaaaagcacaggtgggcgggctccaagcagtccagagggcgatgaggatgccgattgctgggaagatcctggtccctttttgtccccatgttttcaagaggaaggaggacgctgccattttacttgagtgaaagacccttcgtcacgcacgaaacccccgagggctctgggctcggtcctgctgccccgcagtgggcgggctctgtgtgtcttacggttgcatctgttgtacctgagaaacattttttaaacaaaaaaattcaacacaaaagaattttttaagaaaaaaatgctactggcctaaataaggtttatagttaagtatttagtcttaagttgtaagatgctaagtgtagtcataagttacccgagggtgtgtctaaagggaagggggtgctgggacccgcagcctcgccctaaaccagagctcggtttgtttaggtggaagttaaacgagctgagcctcgggacagcaagagccaagcgccgggacagccaggtgccagccagtgggggagccgggttgtgcccaacgctgccaatggctgggcaggccagcccccgcccacgtggcagcaaggatatggcccgcaaggtaaggctgatgcagaggtgcccacgggaatgtcccccttctcggacttggcccgcgcgccctgggctgtgccgtcgctgcggcctccccacctctgctgtgcatgcacagagccgcggttcacagtgtccttgagcccccgcgaggtgccggctgacagccagctcccgggcagcacccgcagcctcctcagtagcggggtggccacggcttaggtgcccgtccggggcctgggactcattgtcaccgggaagagctgcagtgagcgtctgcacctcgcgaccgtgtgccacggcaggtctgagcacgaaaccctgagagggctggcattgccaagctgagctcagaatcggggtgctgcccctggggggcttgaggagccggcaggctttggatccttgccacctgccgttccctctgcagtgccgtgggccctctgtagttaggcccacgttgtgggccgtccttggagcttccagcagccacggaacccctgggcttggctgcagcccgacccgagttgtgggtcagggttccagatgtacgtcgtccgggtcccgagactgtggcttccctgcacctcgtctaaaacctttttctctggagcctcccttgttggaaactcggaggtgctgtggggactgtccctgccctctcgaggcttagaagtctcaggtttctctggggtcctcaggtggagccgggaggtcacccgtgccccagtcagcagacacagtgcccgccacctggcagggcacagaggagagtggctttaaggcctgttctacaaggggtggggagtgcttctctgctcagggttcagagggctctgccctcaggacgaacaggctctaagcacaggaggctccggggttggtcccagcccttgacgtccatgctctgcggctccttctctgcgtcggacagctggtggacacggcgccaacctcctcttctgttctcttatctaggaatgtgggtgccggcaggacaggcgattggtaagtccttgtttatagagcaaaggcggggacagaagccacatggcaggctgactcgccaggtgtcctggggcagccggcaaagcctggttcccgtgtcctgagtgctggagaggaagagagggtgaggggcctgctagggcccctggcaggcctgggtctaactgtggccagtctgtgttgtccagcgctctctgtccatcacccccgtactgtgtgtttcaggtggctatggaccgccccctgcaggaagaggagcccccccgccacccccaccgttcacctcctacatcgtgtccacccctcctggaggctttccccctccccagggcttccctcagggctacggtgccccgccacagttcagtaagtctagggggccttgtgggagggcctcccgcctgctccggagatgccaggtggtgggcggggtgatggggagtcttgtgttacacgtctggcctcagccacaggtggggtgccggctggtcagcaggtcacctgccaccaggcccttcacctgcagatgggctccatcgcctgtggcctcgctggttaggctaaagggcagcccgggctcctgcgggttggagagctcatagcaggaatgtctgggcccaaccagttctcacaggctcctcaggagacagagcctggacttcgtgtcttagcctcatacttcaggattaggggggcatttgtttaagggtgtacaagctctaattgttttttttttttttttgagatggagtttcactctgtagcccaggctggagtgcagtggcgcaatcgcggctcactgcaagctccgcctcctgggttcacaccattctcctgcctc[218 bp omitted]acgtcacttgtaattgaaaagctgagtgtaagatcagccgacacacccagagttttattttattttatttatttatttatggtttttttttgagatggagtctcactctgtcgcccaggctagagtgcagtggcgccatctcggcttactgcaagctccacctcctgggttcacgccattctcctacctcagtctcctgagtagctgggactacaggcgcccaccaccacgcc[131 bp omitted]cgcccggactattttatttatttttttgagatggagtttcacttttgttgcccaggattgagtgcagtgccccgatcttggctcactacaacctctgcctcctgggttcaagcgactctcctgcctcagtgtcctgagtagctgggattacaggcgtctgccaccacgcccggctaattttgtatttttagtagagaacaggtttcactatgttggtcaggctggtcttgaactcctgacctcagcgcatccagaattttagacggggcccccagggtgaggtcttggcaccctccagtagagaagaagggacatgggccatacgtggggtgtcctttctgggagccttgcgtcccttacctgcctagccagggattgcacctcacagcacgcagccagcaggaacggcaccgtgatctgatttcacctgcgggccctgggccctgggggtgtttgacaattggggcatatcacagtgtgagctagtcccgtctcgggggtttggaggctccacgtggccgtggtacaggagcaggcagttccatcctctggcctggatcaggctctgcacacggaggcctgtgggccagatgactgacaggaggggagttgggtggaacctcggcctgcctgatatccagcaacagagggcaagggcggcagcacctccagcatgacagtcccttccaagcacgtcaggatgctcccttgcctgtgctggcagcttcctaaacatggggactgggcatggtggcaggtttttgtccttctgaaagagcaattttgctgtgaggttacttgctccttgagttcttgtctgaggcccacctggcggctgctccgtgaggaacgaggtggccctgctgcagctcagcatcccgccacgctcccaggagtgtgtgtttcctggggggagcggcccgggaccgtggctctgtggtccattctgtggatgtccacaaggcctgggcgttctgtgggtttgggtggcagtcccgtctgggcagctcctgctgggctgggtgtgggtctcctgctggtctgcccccagctgcacaacgtgtcttgtgccttgccctcttgtacctctgcaggttttggctacgggcctccacctccaccgccagatcagtttgcccctccgggggttcctcctccaccagccactcccggggcagcacctctggctttcccaccgcctccgtctcaggctgccccggacatgagcaagcccccgacagctcagccagacttcccctatggtcagtatggtaagtggtctcctgccatgccgcgtccccgctggccccaggaccctgggcacggcctgccttcttctgcttcctcccctgctggacgctccccagcctttacctggtgggaaaggggagagggaggagaggggggtgtgggggttgttggagagatctcgtggcaactcgggtccagcagaagggagcgtgggagtcttgtcgcagcagagcactcgtcatacagcaggtgctgcagggcctgcatgtgtgggaacctgagtggcgactgggtcgagggaagtgagtcgcaggcagctgtgatcactgtctagaggttcaggccctcggtgtgggtcccgggtgcactggccccttggtgggttccagtttctggcgtcatcagcctcctgctgggtccagaccccgcttggggcagaagctgggtctgtagtaggcgtggcctggacgtgggcttcaccctggactggatggctgtcgtggcttgggtctgcctggacgtgatctgcaggcagcgcatgtgcttccggggcaggagcttgtgggggggcggggtcagcatgggtcaaggtctgcatgtcagtagttctcgccctgcactgagccaggagtcacagcagccttgctcaggaccaacgcggtggcctcagtgggcagggctccaactacggtcagctcctccagcaccaggggtcattcacaagcagggtttgagaacatggggcacctgtctgcaggtggccacgggcttccggggtgcctgtgaacacgcttcctctaggcctggtggaggccggggtgtgggagctgtgttcggccgaggtgcccgcccacccacctcgcatggctgtggttcccctgcccccacgcccaggccttgggccgaggttgccgcatgtgtgggttcttgacccactcaccaccaaaccctggcgtgtctgagactggcaggggggtgtgaggcgcccggttggggcgtggcgtgtgtcagccgctgctcttggtggcggctgcttgggttggtcaccctggtctcgtctcttgccaggcctgggttcctattctccagccccgccgggctgcggcccacactttgtttacagtcttatggtcaggctgagcagtgatgtggcctaggtaggtgccgcctccttctccagggtcctcccacccgcctgcaccgggaggtggacgtggcttcctctgccgtcccgggcgggggtggacgctggcggtgccctctgggaaggggcccttgccggtgccaagacattggccacaagccttcagcgggcccaggatcccccagagagagcccacgcccacctgtgcccacgtgcacccgaatgggaacccagaggtcgtgggaggggcttcctgcaaggtgtgcagcggggtggggagcggcgtgagcagctctgtccttgtaaagacaccgctgtccatgctcctgaggtcggctgtgtgggccggacgggctgcagggtgtgctggcccctcagccagtggtgtcactggggcagtcaggttgggcccagaaacccttccctgacacgtgccaccgatggacgtgccctgacaggaaggacaacgtggggtctggtctgcgacggaggggcaggccctgtatcgctgcaagggcccgtcaggggttttctgaaactccgagagccagctttctagaagcctggtccaccgtgccttgggccatgtgtgtctccaagccccgaggcttctctacctcccctcacccccccaaccacgtcttcgggattgaacagggaagcggtgaggttacgtgggccatggagggctctggaagccgcttttctctgtgtgtgcccctgctcacatgtttttgagggagagaacatgcccggggtcctctccccggcccaggtgctggcctcagaagggccccacccgcaccccgtgggacccgtggactcaaggcaggctcggcggagctgtgtccaggtggcctcgctcgacggcagtgccaaccgcccagggaccgccccgagctcacaggactttctcccccagcaggttacgggcaggacttgagtggcttcggacagggcttctcagaccccagccagcagcctccttcctacgggggtccctccgtgccagggtcggggggcccccccgccggcggcagcggctttggacgagggcagaaccacaacgtgcaagggttccacccctaccgacgctagcccgcggcgccgcgacgtctgcacggcccagacccaggattccaaacttgtgaactcgtgacaatcacaaacttggcggcaaagtggcgactcaaccttgggggggggggcggggggagggcgcgaggcttttggagcggctgtgggtgtcgtctggactgaggtttttaaatatttctttctctaacccatcagcacaataaaaaaaagtcactggttcaacaacagggtttaaaaaaaatgtcttcagctttaattcaaaacttcaggtttctttttcttccttttttttggaaattattttcctgagccttttgttttacggtatattgtaaacttttatgttaaagaaaaaatatacatttacaaattgtgagatttttaagagaaattttctacgatgtatactggcttattttttaatttaaaacggggtttccgtcggcactggtggagggggtgcgctgttagtcccctcgctcctggctttgggggttgggacttggtggtccagaaactctgggagcttctagaagaaatctactgagtgtatttctgttttttgtttaattccttgcttttgtcgactgacctgcttggtagtgtctgaggtgaactgtgggggttgcgcacagccagccgcgtggatcccacgcagcgctgaaccgaaccgagtaggaagcctttctccccaggcacgtggcttcagggcgtttcccattgaccagtttgaccctggtttgaataaagagaagtgcgtttggattagaaaccactttgtgtccgttttttccctccttggtcttggcctgtgcctacccttccagtgcctaggaaaggtctgaaacgcgacggaggcgccctcgccctccccttggctcttggtggtctcagcaaccccgagggcttcagggcagaggctgagtggcgagctgggcccatccctcagtgggtcttgggatgctgtgactttgaggatgtggccaccaccagttttctcggggaatgtgggctccaggcttttcccatctcaagacctttaatcatatcttttgccatggaaggtgacatatccccaggttctggggattaggacaggggcatctttggaaagggatactctgtcac[134 bp omitted]accccgtctctactaaaaatacaaaaattaaccgggtgtggtggtgcatgcctgtaatcccagctacttgggaggctgaggcagaagaatcgcttgaacctgggaggcggagcttgcagtgagccgagattgcgccattgcactccagcctgggcaacaagagcgaaactccgtctcaaaaaacaaaacaagaaaaaaaaaggaccatgaagtcccaaactggaagcctacagcgtgccaggcgtgagactgttcaggcgacagccagaaccacccccccccgccccagttcatattttggggacagggaaggtttgacttagtttggagagaaccaagagaaggggtacccccaacatccctgtgcagtgcagtttcctcactgagacagtacccctcaacgcctcagcccaggaagccagctccattccctgccgtcagagccttctcccatgtcctcaggagctgctgccccagctcccaggagggccaggcgggggcggctgtctatccacaccacaggtcatcatggtgttgagtgtcagcccctcccgttacattagctcccccagccaaagagcagcactcacaaaatcagctttccagccaggacactctgctgcaggaaaatgggtaacatggacgggcccgacacataggtcctgtgctcctcgggacggagactcagccctccctgagtacagtgtaattggcttcccttgggactgtggggacggctggggagagctcagctccctggacagtgccacagctaagctcgggttcccagaggttttgtgctttttttttttctttttcttttttttttttttttttttttttgagaaggagtctctgtcgcccaggctggagtgcagtggtgcgatctcagctcactgcaacctccgcctcccgggttcaagcggttctcctgcctcagcctcccaaggagctgggattacaggcacccaccaccacgcctggctaattttttgtatttttagtagagttagggttggtcagcttggtcttgaactcttgacctcaggtgatccgcccgcctcggcctcccaaagtgctggaattacaagcataagccaccacgcccagccaggtgccacatccatagttaatagtcaccttcaa[140 bp omitted]ccaacatggagaaaccgtgtctttactaaaaatacaaaattagccgggcacggtaacaggtgcctgtaatcccagctacttgggaggctgaggcaggagaatcgcttgaacccaggaggcagaggttgcagtgagccgagatcacaccactgcactccagccagggcaacaagagtgaaactctgtctcaaaaaaaaaaaaaagtcactcctacatagttctagttactccttctctttgagctatcattattcacattacatttacatatcttaacaaacccagtgatattcctaactttatttttgaggcagggtcttgctctgtcgcccaggctggagtgccgttggcgcgatcacggctcactgcagccttgacctcctgggctgaaggctcagcctcccgagtagctgggaattttttgtactttttattcttttatgtccgtgtgtacacaaatttttgtatttttttgtagagaggcagtctcactgtgttgtccttactaactttatatacaaaattttatctgttaaagccggaatggttcttttcagcgaggccctgtccctgctccagtatctgtaatgaattctcgtgttcctcccacagtgggacctgaaccgccaaaccgcacctacgagcaaacggtaggcgctccataaatacttgttgatgtgggtgccatcgtgtagatgacggagcacgaacccgaggctcagacaggggcggcgacttgtccaaagtcccactccgtggaggaagcggctctgcagacctcaggcggcggctgctctaatccctgcagcctgtgttttgccctccagacggcagagggcgcgtgttcgccgccgggaaagcggaagcgcgtgtgcgcgcacggccgagggggcgggacatgccggcagtctcgcgataactgcgcaggcgcggaccaaagcgatctcttctgaggatccggcaagatggtgagtgttgcgatttggcgcgtctctgccgggcctatccggctccatccaacctctgaccgtctcgcgggggccgcagttcgtccccgcggctacggcggcttgctcccgaccctgcaggcggctggatgttggggcgaggggcggacttggtgggtgtcgggacgacgcggggctgggaaggcctgtccgggccttcatgtccgggtcctcgtaacccggagccgcgagtgatccccggggacgggtcgaagcggtgtgtccctgtcgggcttctgtccccggcggcgccgcgcgtcttccgcggtgtcctcgggcccggtggccccgggagatgggtgtcgggatcccgctgacgcccgatccgcgcccgcacaggcagaagtagagcagaagaagaagcggaccttccgcaagttcacctaccgcggcgtggacctcgaccagctgctggacatgtcctagtaagggcggccgcgggggtcgcgggcaggggctgggccagcggtggggcttgtccgggtgagggcggcggggcgggggtccaagcgcctctgcggcggtgggcgggcacggtctccgcgcgggtttggaactgagtgtggtcttgcgcccagaaaactgtccagagacgttgaggtttttgcttatttgcaacctgccccccgttgttcacttttccgcggcttagttggaaggtgtagcccctgtctgtagcccacgtgacttagaataaggggctgcgttagactccttagattttaagggcggtggaggtcgctgggtcctttccaggcagggtggtggtgggcatctggcttgcgcttttattttttaatttttgattattttgaggcggagtctcatcctgtcgcccaggctggagtgcaatggctccgtcccagctcactgcagcctcccactcccgggttcaagcgattctcttgcctcagcctctcgagtagctgggattagagggcccccccaccacgtccggctaatttttgtatttttagtagagacgagtt[137 bp omitted]tgtgtcgtccaggttggtcttgaactcctgggctcaagcgaccctcccgcctcaacctcccgaagtgctgggatcacaggcgggagccactgcgccctacctgccttcccctgcgtttttagaggcctttggcccgagctgtacgctgcagcaccttgtctgaggctgtggtctccgggccgcttgttctctctgaatctctgcagtcacacggtggctcttgcatgtgaggggtgagtcgcgcatatctggcgggggtgccagagggacttggcgtgttcattgtagtcactacaatggacagtgacaggtccactgcggctctgtccctggagagaaccaagccttagttctctgtccgccggagtgcgtagggtctccccaggccgggccgctcacaaaactgcctggtgcatcctccccagcgagcagctgatgcagctgtacagtgcgcgccagcggcggcggctgaaccggggcctgcggcggaagcagcactccctgctgaagcgcctgcgcaaggccaagaaggaggcgccgcccatggagaagccggaagtggtgaagacgcacctgcgggacatgatcatcctacccgagatggtgggcagcatggtgggcgtctacaacggcaagaccttcaaccaggtggagatcaaggtgtgtgcggccgtccctgccggctggggtgggctggggtcgcctgatgcaggcgggatcagctgacacccagctttgctcttggtctcccgcagcccgagatgatcggccactacctgggcgagttctccatcacctacaagcccgtaaagcatggccggcccggcatcggggccacccactcctcccgcttcatccctctcaagtaatggctcagctaataaaggcgcacatgactccagtcctttgcgcagcttgttcttcctggcgtcccgagctctgggaggggcctgggcctgcttcaggttcgtggtgtgaggaggttcaggttggacgttcgggggtgtgtggtagtgttgtgtggatggtctcttggtgtcgaagactgacagctgtgcgggccctgccccaactcggctgcccctgctcctgtctgcagggacagctgtggagctgggtgcccaagcccaggtgtgtagctccgtcccttttggccccctcagcgttcttgacctcggggcagctgcctggcctcactctgtcttctgggtacctcacgtagagggggccactcctgggctaagtgcagcccctcaagccctcacctggcctgggctctcctttctggcttccctcatctcctgtggagggttcccgcaggaagtgaagcagcagcaggaacctttgggccacctgagcccctcccttctatcctcacccctgcttggcttcttagaagctcctgactctcctcctgacaccacgctgctggcatctcctctcccagcaggctccatggctgcagccagccccatccgcccagcctggggctttgtgtccgggacagagccgtgtcccgtggttaggctgcaccatccgtggcctggccagctctgtctcctttgcacagaatgcttgaaagaacaggacaaagtggctgtgcctgtgggtggggggcaccgtccagccctccatgggctctctgatggccgtacgtgggttggagaacatggtgagaactaaccccgttcaatgctggagtcacctcagcccagaaggtggtaactttgctcactaagcacccagcagagtggcccagggatgtggggtgggcctccccttgggcagtggacaggagggtgagagctcagccaggcagatgggggcaggggagatgtgaggagccccaccttcaccctcaaatggcccacaacagcctcctgtgggccctcttctataatgtttctccacttttttttttaaatttgttgcccagccggagtgcagtggtgtgatcatggctcactgcagcctaaatctcatgggctcaggtgatcttcccactgcttcccaaagtgctgggatcacaggcatgagacactgcagctggctatatcttcaaatttaaacatgatttgcagccaggcgcggtggttcacgtctgtgatcctagcactttgggaggccgagatgggtggatcacctgaggtcaggagttcgagaccagcctgaccaacgtggtaaaaccttgtctctactgaaaatacaaaaaaattagcctaactgggcatggtggcatgcggctataatctcagctacttgagaggctgaagcaggagagtcacttgaacccaggaggcggaaatcgcactctagcccgggcaacaagagctagactctgcctcaaaaaaaaaaaaaaaaaaaaaccatgatttgctcgtgttcttacctctcgatttggaattaagttacattacagagaaagtgtgggtccgtgtttttctctctgtttgggaaaaggtgggttggacagaggaaggatggcccagggttataagcttggctccagtacagccgggagacccccaggcagcatgagtcggtgggactggacctgcctggctggtgtccagaggggcccgtagccagtgggacggtgctgcacgtggtcgtgcctcaagccctccactgcaccgggcgccctggccaaccctgccaggaagtaaggagaccggggaggccactgagggcctggacctggctgggtagtcagaagtgggggcaagtcttggctggcagcccctgagatgtgtagaatgtttgaaaattcgcctgtgggttgacctgaacccaccgggcttgaaaccaacggtccaaagtttggagtgtggtcttaaggaaggagaccactactactcctgctgccttcctcccaccaccttgcctagttcacaagacaggaggagagaaaatgcaaaaagttggaaaaaaaatgcaaaagtaagataaacagacaaccttggcaccaccacccggccctaggagttaaaaaaaaagtaataataacatcaaccactgacctaaactacttgtgttatctgtaaattccagacactacgaaaaagcattgtaaaactttctgttgtgttagctgatgcatgcagcccccactcacgttttccacacttgcttgatgtatcacgaccctttcacgtggaccccttaaagttgtaagcctttaaaaaggccaagaatctctttttcggggagcttaagacgcgagtctgctgatgctgccggccgaataaaaacctcttctttaatccagtgtcaggagttttgtctgtggctcatcctgctacagtctggctgctaggtggccgccggaggtctctgggcagcactggccaggttcacttcagcgtgaacagcagaagcttgtacgggacccagcttcgaaggcccaccccaggtccagctcaaggagagggagggaaggcatgtg[134 bp omitted]ttaaagcaattctcctgcctcagcctcccgagtagctgggattacagaagcacgccaccacgcctggttaatttttgtatttttagtcgagacaggatttcaccatgttggccaggctggtctccaattcccaacctcaggtgatccgccttcctcggcctctgaaagtgctgtgctccagcctgggcgacggagactccgcctcaaaaaaaaaaaaaaaaaaaaaagaaattgctgaggtgttaggtgcttttcgcctcagataagcaaagtgggaaattagtggatgtcccactgaaacagctttatctgcaacatggttttcaaccctgagccttagaaatcaaaagtgccggaaaccatggtgcaca[148 bp omitted]cccatctctactaaaaacacacacaaaaaatcagctgggcgtggtggcgggcgcctgtagtcccagctactggagaggctgaggcgggagaatggcgtgaacccgggaggcggagcttgcagtgagccgagatcgcgccactgcactccagcctgggggacagagcgagactccgtctcaaaaaaagaaaaaaataaataaatggaaatgacagagcttttgagctaccaggtctatctgcagagcaaatgacacagagatgtgtggggccgcgcccatcatgaggcagctagctgggaacaagccccagggggccctccctgaggaaagcataataggaatgggtgctgggcctcacttcgcttttgcagagctttactggcacccagctgtgcccattcatacctgtattacttctgccaggcagacgctgaaaatttactgtctggacctttacgggaagtttcctgtccataaaagccctccctgcacacgcccctgctggctagcacgtggctgctaatgggtacttcccttggttttctgcagttggaatccagcatgtgtgatcagggaaaatatgtattagtatttaaagcaaaaagatacccccagttcagagagacacatgtcttggtggccaggtggtgccctaggtccacaagaatttggggggtgtccaggaggtggggtgggagcctctaactagcactagggtgccactgtcgagggccactcccaactcaaggcccaggctctgtctttaggcctctctggccatatccgcacttcttttttttttttttttttttttttctgagacggagtctagctctgccgcccaggctggagtgcactggcagaatctcagctcattgcaacctccgcctcctgggttcaagcgattctgctcagcctcccgactagctgagactacaggcatgcgccaagacgccggttaattttttgtatttttagtatagacggggttttgccatgttggccaggctggtctcgaactcctgacctcaagtgatccacccgcttcggcctcccaaaatgctgggattacaggcgggagccaccgtgcccggccccacgcttctgtttctaccctctggtcccacaccccgctccagaatctgcatggactctcccagacctgcccggccccatctgtgccgtctcagacagacagctccgtcctcatcaggttcaggtctggccccggcgcttgcgggtcagctgccttcaggccctgtcctggttcccggcgcttctcacatccccgcggcctcccccctggacggcagtttacactgaactcggcgccctcccctgacttctgaaggaggagtcctgggtggccccgaagcctccccggcagccgcacggctccgtccccgctccagggttcagctgaggcacctgctggaggcggcctgtccccgccgccctgctaaagcggcgcccctttctccggccgctcgttctttggtttccagggactttgcacaattcataacacccctcttagcccccatcctgcccgggccgcatcttccgcccgatcatccggccctcgacccgcgcagccgcctccgccctcctctcccggcaccgcccacggcctgttctccccgcagccgccagcgggcgcccgcgagcctggagccgggcgcggccctgctctgtccacagcccgcggtggctcccacctcccgctgggcctgcgcgacctgccccccggggcctcccagccctcactgccctcgcgggctgcactctcccccaacactccccagggctgttcggcctccccagcagctccccatgccctgcccgccgcgctggcgtctctcccagcccgctgcagtcccctcgttcacgtcagcttcccaagggcctggattttgttttgttcagtgcagggggacccagcacacagtaggtgctttataaatgcttgttgcatgaatgtccgcgttcggtgtcgcccccttacggcggccccccgcgcgcccagctcggcgcccagcaagccttgtgcgcgcaggtgatgtttgctgaatgactaatgaacctcagcgcgccaagccgggctgattcgggggtggttccgagcttccgcagggtgaccgtccgcgggcagcggaccacagccgcatggcgacgccgcctctggccccccgcgacccccattccccgtgggacctctcgtgcccccacccccacccggcctcctccccgccgcctcgggcccccccagcctcctccgcattcgaactccccagcgtggtcggacccggaccctggcgccgctcggcccacgcgagtcccctcccctctctcccatccttggatctcccaccgcccctccgcagcctcggtcccgcgagactccccagcccccgcgagcacccccagaccccacggtacgccctcgcccctttcgggaggagccccgccccgggcccgcggactgacccctcccgcccctctccgcgcaggcgcagggcggccccgttcgcgtcccgcacccccaccctggccgccgaggggcggggcgcggcgggtccggggcggccgcggctccatggggctcctggggctcctgagcctgctgcactcggccttcttcggggaccaggtagggcgcgtgggtcgagccgttggggagggctccgggccgcgcaggaacggggcggggtccacaccgcgggaacagcgggcgcggcggcggggggcgcatggggcgagcgcgcggaggctgcagagtcgggggtctagtgccgtcgccgtagagaccgttgccgggaaaccgcctcggaaggctggcggggatggaagcccctctcgtgcgccgctgcgacccccagccccgggtctgcgcaagcgcagggctcgcccagcccagccctcggcctctgcaggagaccctcggacccctcctcactgcgccgacgcggaggctgcgccagctggggcggcgggggcggctgcgggggcatcctgcggaggctcggccctgcgcagggtgggggcctgggccacgccctgcgcttctttgggcctcagtttccccttctgggcgcgagcgtatggcctgctttgacgttcgccgccgctgctgttcgtatccgtccgctcccgaccccagcgcttctccagcctccggaatcgtctgaatttcgcggctgtgacatccctcattggaggggaaactgaggctggggggtgcagcggggagcccaaggtcacgcttcgaggccggagcctcgttgcggagctaaggcgcccgcaagagaacgcggggcgggggccggggagctgtccgcggtgctgacggaggcgcacgtctgccgactcgccgccggggaaactgaggcccatagcggcggtcaggcttcagggcgcggcctggaccggcctaccccaccctcccccacctccggtggcctcctcaccggtcagggctctgcccggccacccagccggcggcgggccgtctctatcctcccgcgatgacctggtgccttctctgtccccacccagctcccgatgggggccgcccctgtttctgcctctagcccctggcacagaggaggcatcaagggggcggggacagctcgaggtcagactcagaaggctcaaagacactccaagagtgagccgtgtgccaggctgcggacttgcggggaggtgtcacaggacaggggtgggggagtgagcatttcatggaacttcccctttagcccagcagcagtagggggcgtggaggaccccagggaggagcctaggtcggggtcttgggctaggccctgcgttctgcagtgggagaagggggagacctctctcagtctcctgaagtcctagggggctgtggggggttcttgaggctctgaaatgtctggtgatgtctgagtgtggctgtggttcaaggatttacagggtcgaggattttagtgtgtggggggggattgttcagggacataatgttttgtagatttggggccaagggcatcttgtcttggggtctcagcccccatgtaccctcagccctccaggccctggccacccccagagggataagaagggaggttcagtgtcactccggaggcctggctggcacaggtgaactcaggcaacacgttccctggcccaggcctcagtttccccatgtatacaaggacaggactgaccttggatcccccaaacccctgcctgatgggggcctggggagctgagacatctgaaactacacagggaggtgggacttagttcctctttgggggaggcagggatcatccaacccacccttcagtaaacaagactggaaaccgaggccagagagagacatgcccagggggacacagggacaacaaggctgagctgaagccagggccctgggctctgcatccccaaccccatttcagcctcgcccagctctgccccggcttgacctgtcaaaccccaccacgcgccctaccccatggctccaccagacaccccctgtgtcccaagcatgcattgatcttccctcagcctggaacgcctctcctcctgatcactgctgttcacttctcagggcagccttccagcctccagaaaaaaatccccttcgaggcgggcggatcatgaggtcaggagtttgagaccagcccgaccaacacggtgaaaccccctctctattaaaaatacaaaaattagctggcaaggtggtacatgcctgtaatcccagttactgaggagtctgaggcaggagaatcacttgaacccaggaggcggaggttgcggtgagccgagatggcgccactgcactgcagcctgggggacag[179 bp omitted]tggcgggcgcctgtagtcccagctactcgggaggctgaggcaggagaatggcgtgaacctgggaggcggagcttgcagtgagccgagaacgtgccactgcactccagcctgggctacagagcaagactccgtctcaaaaaaaaaaaaaagaaaaaaaagaaaaagaaaaaagaaaagatcccctgtgtctgcccactgcattgcctccccagacccaaccagtggggacagctgcgtccagctctgggggctcccagacagccaggccgaagggctctcagcccctggcagtgctggcccgggacaaggccctcgggtcttcagctcaaggcccaacaggaaacagcacgggtcctcccttgcctttgtctacggggccttgaatactcggaccttcccaccctctcctatcattccctgcaccagcccttgcagaatcttccgcctcctctccattttacagaggaggaaaccgagggttgagcggcgaatgatttgccctgcctgcccagcacggaaaaaaatcactcttctggccccagtcgcctccctttctgtgctgtgagtctgtgtccagagcaggaagggctgctccgagctgcagggacgggctctgtgtgttaaaccttcaaatggcttccagggactcatggagcatccaggacacctggagatggcgactcctgggacccctggcccttccctcctctggccttcggtccgtgagggtgaattaagtgtgccacccaccaggggcagagacacatggagacagagattgagagacagagaacagagggggagacagaaagagagagggacatgaagagcaacggagttacaggaggatctgacgctccgttggggagacagggagaaatgtggggagatgcagcgtcccaggtgctccccagtggccctgcccctcctcccctctcccctccccaccaggcaggaccctcagggagctccagcctggacccgaaccctgtcccaccctgacgcacctgcaccaggccaggctggacctgtggggtgggtgcaggcctggccccagcccggccactgccctggaaacccctcccccgccaagatgctgatgtaacatccaggatttgatgttttactctccaattctgcaaatccagacgcaggaggttttaagaggccgttgcaccctgcaataaagtgcgggacacaggaatcttggtcctcggggcacccccttccctcgggggggtttcgccccccgcactcacggcccctgagcccgcgcggaggcccgacgccccgcggccgacgccggtccccgccccgggccgccattggctgttgccatggcaccagcccgtcttcccgcgccctcattggctgtctcacccgcatccctcatcccgcatcctcccccgctcgcggtggtctcgcccagcgctaggagcggcagcgccgcctgcccaggcccggaccgggctttgtccgccccggagcccctgcccgcgccgcggagaccccggagcccgcgcgctccgaggccaccccgggccgggatttccggtggggcccgcggagccgcgcagagggaggaggccccagacccaggcgccccgccagcccagctgcacgtaagcgggtgtgtgtcctcggggaggagggcaggggcgcgacctccgcctcgcgtcgaggtttccatccctggctctcagcattgcccgtcagcacagactctggaccctccatttccccagagtgggagctggaggggaaactgagtcccggtgagctgggcgtcagcgtttctgcagccggtcctgcgcacacacccactcacgggcttcaccatccggacctccctgaggtgatcggaggaagggatgggcaggccagtggtgtgtcttcgggggtgttgctgcacctctctgggtgtcagtttccctctctggaaagagggggtttggattaaaggaaggagaaaggcccctttgggcctggcttcccatacctgtgcctccctcccctgaaatgcagcccgctcaataagaccagcccccagtcatggtgccttcagggagtgatcgctcaggaaggcccccaggaggctacacgatgcaacctgggggtgaaagtaggcagaagagcttcgtggaagaagctgcactgtgtgggatggcaggacttagaaaaggtgctctaggcagggcaactgcacgtgcaaaggcctgagagaagagagcctccagcctctaagtgagtcgcggtgtacatggaggagtcggagcgtatcctgagggcactggggagccatggaaggtgtttgagcatgggagaaatgggatctcacttgtgacgtttaaagctccctctggctgtgcatgggggactgtgggaggccaggaagaggctgatcagaatgtcctcacagaggggtgtcaggagctgggggaggcatgatcccgctgggcagagcttggagggactagcttagtctgatgaggatgcagaaatgaccaccgaatgtggggagagggaaggtgtctgaggcttggcttcggtcagctgagaagaaccacgtgggggaggcctgggtttggggagcaggaggcagacatgtgttgctttgcacgtcatctggtccttccacctggctgggcatgggatggtgacctcagctggaacatggggctcgagccagaccccagggtctccctgcgtgtagcccccaaccccaagcctgatccccactggagacctgaacagccttggacatcatcggatcagggtgggaggtgccagcctctgccacctgacttccagtccctgtgcccctcccaccctgcccttgggcactcctgccctgcaggttcctcagaggggcaacccaaagccagagaggggcgggtcttgtcgggcctccagcctggacttcccagcccctctggggcagcatctgggtgccagacctcggttcctagggcctcgtttctccctctgggaacagccaaatggtggtccctgagactcaggacagaccaagaaggagccggatgacatggcaagccacacactgcgtcccctgagcaggacgggacagcccgactccatcctcccacctgcgactgagcccccacccctactcctgtcccagccgtgcccctggtgacatttgggtgggaggggaggggatgagggggcacctgggggtcagagaacaaatgacgggtgaatacatgtgtgtggccaggtggaggagggaggggaggagcaggtgggctggacagggccggtgtgaggaaggggctcaggctggcagggggaggtggcagagggatgggctgccattggtgcgtctgagacaaaggcggagggaggaggcgagcgctgatgggaaaggaacaaagagggaaggggggcgtgaaggggggctccggcgggagggccgagccgagggaggaggcgccggccagctggacagagggaggaggccaggccagagccagaagacggccagaggcacaaagaagccagcgcgctggcagagtcaagggatggggcaggggctgccggggccagcagggaccagctgaaggctgcgcagggggtgcgggccacacaggtagccaccctgagctcagccaccgatggagggtcgtggggctgctgcggtgatggcggtgggcttgggtccatctgtcctgccgtttctgcacagcttaggtgtcacccactggccttcgtggtgttttcattgtccatcggcagggacagctggtggtctgtccgccccgcgtgtctggctgtcagcctctgggcaggcttgcttttatgggggagggtcctgtctgtctgtctgtcgccctctctggctgtgagcctgggggtgctgggctggccagtcggcttgctgggttaggctgtcccagctgtctgtgtgtttgtccggctgtcaggatgtgtcctgggggctgggaaggagaggccgacccatcgtctgtcggtcgactggtcagttggacgttcagctgtctgtacgtctgtctgctggcccctctgtctccccttggggccacctctcactccacctgcccctctgcgccccggattgcctggccaccaccacgtgggcctgtacttgtccacaccagtgactcctgcctgagaccccccccaacccaggatcaggcaggacggctggggcttaggtcaggggccgtctgtccggaaggcatcaccgcgccctccccagaccatcagctgaaccctctgaccctgtgatcccagacgctgcaggagctgaagatggcgagctccgtggcgccctacgagcagctggtgaggcaggtggaggccttgaaggctgagaacagccacctgaggcaggagctaagggacaactccagccacctgtccaagctggagacagagacgtcgggcatgaaggtgggggcctacatggaggaggtgggctagggtcccggggtggtgccccccggcagcccagtgcagtggctgatggcttcccgccctctttcccgcccctgcaggaggtcctgaagcacctacagggaaaactggagcaggaggcccgagtgctggtgtcctcggggcagacggaggtgctggagcagctgaagggtgagcggtggggccacccgcagagggagtgggggaggctggggggaaaggcaggcagggccgctgacctccgccctgtccccgcccatccagccctacagatggacatcaccagcctgtacaacctcaagttccagccgcccaccctgggcccggagcctgccgcccggacccccgagggcagcccagtacacggctccgggccctccaaggacagctttggggagctgagccgggccaccatccggctgctggaggaactggaccgggaacggtgagtgggcgtgggaacccagcctcgggcagctggagcatgactcggtccccagcgggctctgccctctaattcgcccacccgcatatgtctctgcccacacctcacacgccccacccacttgcatatggcactgcccaccgaacaaccccgcccacctcggagcttcgtccccacgtggcctccctccccctccccagcccggctgacctctgctggagttcagagaggatgggggacgttcctggctgagggaaaggctccttggagacgtccccaggggtccgagacacgcaggcgtcgccagggaccgggctgtgtccggtgccagggctcagccaggcctggagccaggcgggctcaaagccgtctttgtagagagctgtggcccaagaagcgtgggctcagggccagcagagggaggcagggtctgggcaccctgtgcagctgggaggggtcatgtggggtcagatggggccattgaagagcagcgtggggttgtctgtgctctgctgtgggacctcactcagctcccctaaaccctcccagcctaagactcctgccctgtaaaatcggaatggccgtgtctcccatgaggttaagggaaacctctgttgcacctggagcactttgagcctgaagctaccttgtaagctggagggaggttagcaagtatgggagaagtgttagaggcaggacagcctccctcagtctttcttcaaggaggagaatttccaaaggaattgctttctcttttttttttttttgtttagtacatatagtttgaaacagggtctcactctgtcacccaggctggagtgcagtggtatgatcatcgctcactgcagcctcgaactcctgggttcaggtgattctcccacctcagcctcccatgtcagggagtagctgagaccacaggtgcgcaccatcatgcctggctaatcttttgtacttttttttttttttttttgagacggagtctcgctctgtcgcccaagctggagtgcagtggcgcgatctcggctcactgcaagctccgcctcccgggttcacaccattctcccacctcagcctcccgagtagctgggactacaggcacccgccaccacg[187 bp omitted]gagggggtctcgctatgttgcccagactgttttctctcctttaatttttttgcatcccccagttaatttcaatacccacccccccccccttaccctagctcggggagtgccacgggagagaccttgccatgttgcctgttaaccttggcatacagtaagcgctaacaagtgattacaaatatcaaaataaacacacacggcgccgccctctgagcccgcccccgctgacttgctccccaggtgtttcctgctgaatgagattgagaaggaggagaaggagaagctctggtactactctcagctgcagggcctgtccaagcgcctggacgagctgccgcacgtggagacggtgagccggccggggagccagggggcagcgcgcccgccccactcagggtgcgggaagcggcgtgggggaggaacggggcctggcccgggcgcccctcaccgtggcccgcccgcctgcctttgccagcagttctcgatgcagatggacctgatccggcagcagcttgagttcgaggcccagcacatccgctcgctgatggaggagcgcttcggcacctcggacgagatggtgcagcgggcacaggtgcggcggtgggcggggtggcgcggcggtaggcggggccctgcgccagtgggcaaatcagagtgcagatattatgggcggggtctggggtaatgggaggagtcttatgcctcctgggttggggggcgcgggttctggttcaggaggcggggccagaagctggaggtgttggtgggtggagtcaggaggctcagagcctgagcacaagggcggtggggtgcgacagtggaaggtggcatggcctgtgggcagggccagatcagcaggtgggtggggcctagaaggacgaggtctaggttctgggtggagcccaaatgggaagtgggaggagtcagagcctgggatggactaaaggcggggtttagacagtgggtggggtcatatcttaggaggcggggcttagggagctggcagggctggatcagggagaaggcagaggtagggtcagggcctggggcggggttatcaggaagaggcggggtcagagcccagggtggggtcatcccagggagaggcggggtcagagccgggggcggggtcagctccagcacttgccctcgtgtggtcctgagcagatccgcgcctcgcgcctggagcagattgacaaggagctgctggaggcgcaggaccgagtgcagcagacggagccccaggtaccgggtggggcagagccagggaccaggggtggtgtcggcccaggcagaacggggctcctcgagttctgcccgcccccgcccacatcatcacgggtgagcagactgggtgctctgggactgtacccccgaccctggtgctctccctgcaggccttgctggcggtgaagtcggtgccggtggacgaggaccccgagacagaggtccccacacaccctgaggatggcacccctcagccgggcaacagcaaggtgagggggagggtgaaacgggggctggcgcagctgtctgggctggaagggggatcaggtctgcatcctcgccagtggtggtgccctcccatgcctccatccagcaccccctcgggtgtaggaaggcccctctggcgtgcagctcatgcagaagctgcgggcctggcgaggtggatggggaaatacgtcccgtagcgggggctaagtggggcaccatagacgtccccgtggagtcccttggctctgcgcggccaccctaggaatgccaggtgaggggggccagcctccccgaagcacgtgtgcagcctcctagcgtcccctcatctgtcccccaggtgggcgtggggctgcccttggggacggggcaggggtcacagggctccgaccgggtttccaggtgtgcggggggcaggtgagggaccccaccctgaccctgccctccccccaggtggaggtggtcttctggctgttgtccatgttggcgacgcgcgaccaggaggatacagcgcgcacgctgctggccatgtccagctcgcccgagagctgcgtggccatgcgccgctcgggctgtctgcctctgctgctgcaaatcctccacggcaccgaggccgcggccgggggtcgcgccggggccccaggggcaccgggcgccaaggacgcacgcatgcgcgccaacgcggcgctgcacaacatcgtcttctcgcagccggaccagggcctggcgcgcaaggagatgcgcgtcctgcacgtgctggagcagatccgggcctactgcgagacctgctgggactggctgcaggcccgagacggcgggcccgagggaggtggcgccggcagcggtgagtgcctggcctggtgggccccctccgcgcaattaacgtgcagctagggcttcccgggggatgggcgactaggacctccagcctttgctgcctgccttctggcgttggaggctgcagtaccaggctccggccgaggcctgtgggggcatttgacgttgggaaaagacccgcccatgatcgtacctggcgcagagtaaacgctcgggaagtcgctgaatgcatggatggatcgtgggtaactctggaaagttgggtgcagactttgagattctttttttgcagttgatcgcaaagttaatatgggggccgggcgctgtgactcacacctgtgatcccagcactttggaaggcagaagcaggagaattgcttgagcccaggaatttggggctgcagtgagctgagatcatgctactgcactccagtctggacaacagagcgagaccctgtctcgtcagttttatttttaaaaagggcagaagcacagctgaaaggtgtggtgctccaggaactacctcgcctcccttcccaaggctgagtgagagaggccaccccatcatcccatcttagagaggctgggaaaggaagtcccaactttgcagccatttgcaaagctcccgggatccttcaggcctggggcgggcgggttgcgggaccttcgggagtcacctgggacatttcctgggaatgggggctctgatctggtccctgtgcccacagccccgatccccatcgagccgcagatctgccaggccacctgtgctgttatgaagctgtcctttgatgaggagtaccgccgtgccatgaacgagctaggtgagtgtcccaggtcctctgggaagccatcctccagcccccgaacaggtggtggctcctcggccgctaaagggacacaggctgggtcatctgagcttgggctggggattggagcccggagagggacagactccctggagtcacatagcacctctcatgagtggaccgtcaccctgggccctctgtccccatgagctgcgtgtggcctcccgatctggtctgaggcttcgggggtgactttcagccctaagttccctggggctcagaacagggaacggaccagaagggcaaagatagatagaagacaggcccagaattggaactgtagggggtgttttacgtttgaggacattgcaacatcttctctttgtcaatataaaaagtaattgaggccgggcgaggctgctcatacctgtaatcccagcagtttgggaggccaaggcaggaggatgactttagctcagaagttcgagaccaggctgggcaaaaatagtgagaccccatcactacaaaaaaaaaattagtcccagctactggggaggctgaggtgggaggatctcttgagcccaggaggttaaaggtgcaaggagctatgatcatgccaccacactccagactgggcaacagagccagaccctgtctcaaaaagaaaagtcttgctgtaacttttttttgagacagagtctcactctgttgcccaggctggagtgcagtggtacaatctcagctcactgcaaact[133 bp omitted]tcggcctcccaaagtgccgggattacaggcgcgagccaccacgcccggccactttacatcttcaaactctgtcccggtgaaacatttcctgctcatcctgtccccagcccctggcacccacccccatcctactttctgtctctgtgaatctgatggagctagggacatcctaggagtggaatcacacaggatttgtcattttatgcctggcgtctcccactgagcgtgacatcctcaaggtgcacctacgccatagtctgtttgtttcagagcctcattccttttgagacagacagggtcttgctctgttgcccatgctggagtgcagtggcgccatctcggctcactgcaacctctgcctcccgggtttaagcgattctcctgcctcagcctcccaaagtgctggagttgcaggcagaaggagccaccacacccggccaaagcctggctcccttctgaggctgcgtgacatcccatcgtgtgcacagggcacgctgggctgacccacttgtcctcctatggatgctctagctgccccccactcctggctctgtgaatcgtgctgtggtgaacctggatgtacgcgtttcaggctggaagttttctgagatatgtccctaactcacttccccaaagggtgtctccactgacccactcctgctctgagaacagtcacatttgcctctgttgtctttgaagagggagaaaagtgttttggtgacaagtcctcctctccctctgactcacaggcgccatctccccgttgatttcccccttttgtaatggggaagcggggcgagtgaagagggtgggtgtggccgtcacccatccctacagccctgtctgtgctggggatgctgctctccatctgatggtcttggggtgtattattagaggactcagggggccttccccgaggcacctatcaaacagggcagggaagaacattccaggctgagggaacaacaggtgcagaggcccagtggctggaggaagcgtgagccaggaccgagggctgacaggaggcgggggtggcagtcacagggcactgggggtacccctgtgggtctggcagcagggtgaggccataccggctcctggaggaggtctcagacttgggcctggaaggggaacttgagggcaggtctggggcatagggagggcctctgggcaagggagtgaggtggggcgctgggcagcaggcagggtcatccctgccacccaccaaccttgttgggtcctcacaggtgggctgcaggccgtggcagagctgctgcaggttgactatgagatgcacaagatgacccgggacccgctgaacctggcgctgcgccgctacgcgggcatgaccctcaccaacctcacctttggggacgttgccaacaaggtgcccgggggcagtgggtgggctggcactttcctcatccagtcttccagggactgagcctccttccaactcatcccagcctcgaaacagccctgagagctggggccacttgtccccaacttacagacgggtagactgaggcccagagagtgcggtgtggggggacgggagcgcgtgctgaacctccccacctggcggtgtcctcacgcccaccctgttgctgcctctgcagaaaatggccctcattgtagagggggcctcagggccccgaggctgggtgtctgcccctgtctgggcctcagtttcccgacctgagcatggggtaaccgtccccggtagtggtcaggatcagcaggggtctgagtttgcagctgcagcacacagacggggctgggaggtgaggggcacagtctcccttgtgtcccaaccccgtgaccccggctgcataacccccaacaggccaccctgtgtgcgcgccgcggctgcatggaggccatcgtggcccagctggcctccgacagtgaggagctccaccaggtacagggcggggtgctgggaaagccttccagggtgtccctgataggcagaggcccctccccagcggtgtggtgggctggcaggggtgtcccgtccgactctctgcagactcacatttgctggggggtttggggggcctggaccctagtcccaccacacttgcccctcaccccacccaggtggtgtccagcatccttcggaacttgtcctggagggccgacatcaacagcaagaaggtgctgagggaggcgggcagcgtgactgccctggtgcagtgtgtcctgcgggccaccaaggtgggcacccggtgggcggcagggatgcttcttcagtcactggaaggagactgctggcggcagcgggcgagctctccgacttgggaggaaatcaagttgaacagctcactgcttagcgggtggtccagcctcagaccggctggggctcactcctcatgtcactgctctttgaaagcaaatgtgggctgggcgccgtggctcacttgaggtcaggagttcgagaccagcctggccaacatggtcagaccccatctctactaaaaaaaacagccaggcgtggcagcgggcgcctgttagtccagctactcgggaggctgaggcaggagaatcacttgaacctaggaggcggaggttgcgccactgcattccagcctgggccacagagca[212 bp omitted]gaggcaggagaatcgcttgaactggggagtcggagcctgcagtgagtcgagatctcgccactgcactccagcctgggggagagagtgagattccgtctcaaaaaaaaaaaacaaaaaacaaaaaaacccaacttcactgaatgtgagcgtgggagcctttcctccgggccactcaggccctgacccgcccctctcccgcccctcgtccaggagtccaccctgaagagcgtgctgagcgccctgtggaatctgtctgcacacagcacagagaacaaggcggccatctgccaggtggatggcgccctgggcttcctggtgagcaccctgacctacaagtgtcagagcaactcgctggccatcatcgagagcggcggcggcatcctccgcaatgtgtccagcctcgtcgccacccgtgaggactacaggtcggcccccacccccccacccgcacacaggcagctgcgctcggggcgggcacagggctgggctgggcactgtcctcccgtgaatgcatgctcccaaggcttccccaggggctgctgtttgcagcataaatacgtcccaaatactgcgtgagatatactaaaatgc[133 bp omitted]gaaagcctgtccctactaaaaatataaaattagccaggtgtggtggcgggcacctgtaatcccagctactcgggaggctgaggcagaagaatcgtttgaacccaggaggcagaggttgcggtgagctgagattgtgccactgcactccagtctgggcaacaagagcgaaacttcatctcaaaa[169 bp omitted]ggcatggtggtgggtgcctgtagtcccagctactcaggaggctgagacaggagaatggcatgaacccgggaggcggagcttgcagtgagctgagattgtgccactgcactccagattgggcgacagagcaagattccgtcttaaaaaaaaaaaaaaattacttcaggctgggctcggtccctcacacctggaatcccagcactttgggaggccgaggtgggcggatcacctgaggttgggagttcaagatcagcctgaccaacatggagaaaccctgtctctactaaaaaatataaaattagccaggtgtgggccgggcgtggtggctcacacctgtaatcccactttgggaggccgagatgggcaggtcacaaagtcaggagatccagaccatcctggctaacatggtgaaccccgtctctactgcaaatacaaaaaaaatagccaggcatggtggcgggcacctgtggtcccagctactcgggagactgaagcaggaaaatggcgtgaacccgggaggcggaggctgcagtgaggtgagatcacaccactgcattccagcctgggcgacagaggggactctgtctcaaaaaaaaaaaaaaaaattaaccaggtgtggtggctcatgcctgtaattccagctactcgggaggctgaggcaggagaattgcttgagtctgggaggcggaggttgcagtgtgccaggataaggccattgcacaccagcctgggcaacaagagcaaaactgtctcaaaaaaaaaaaaaaaagaaaaattagcttggcttggcgtccacatgtagttccagctacttaggaggctgaggtggaagaatcacttgacaataggaggttgaggctgcagtgacctgtgatcacgctactgcactccagcctgggtgatgggagtgagaccctgtctcaattttattttaaatcatattaatataactgtcttcattaaaatatttaaacaatagagaatacttatttataaaaataaataatatttttaattgaagt[144 bp omitted]tgaaactccgtctctaataaaaatacaaaaattagccagtggggtggtggacgcctgtaatcccagcactttggcaggccgaggtaggtggatcacctgaggtcaggagtttgagaccagcctagccaacatggtgaaactccgtctctactaaaaatataaaaattagccaggcggggtggtgggtgcctgtaatcccacctacttgggaggctaaggcaggagactcgcttgaacccaggaggtggaggttgcagtgagcggagatcatgccactgcactccagcctgggtaacaagagtgaaactccatctcagaaaaaaaaaaattattaaaataaaaatgttgttaaataagaaatattaaaataaaaatatttacatgttatttatgaaaacacaaaatattatttttacctggtcatcgtggctcacgcctgtaatcccagccctttgggaggctgaggcggttagattgcttgagcccaggagttggaggctgcagtgagccatgattgcaccactgcactccaggctgtacgacagagcgaaactttctctcagaaaagatagatatagacagaatctatctaagtataccccagataccacataggatatgtgcatgctgttttttcctttttttttttttttttttgagatggattcttggtctcttgccaggctggagtgcagtggcgcgatctcggctcactgcagcctctacctcccgggttcaagcagtgctcgtgcctcggcctcccgggtggctgggattacaggtgctcgccaccacacccagctaatttttgtatttttaagagagagagggtttcaccatgttggccaggatggtctcgatctcctgacctcaggggatccaccccacttggcctaccaaagtactgggattacaggtgtgatccactgcacccggcctaccttttttttttttttaactccatctcaaaaaaataaaaataaaataatttagtctctgtcatgcaatctttgggatatacttataccaaaaattagtctttccaagatccaaacctaaccagatgcgtttacttttacctgccacatctggcccccccatccttcggtgggcaggggagggtggggggtggcccaggctaacccgccctgtgcctacaggcaggtgctccgggatcacaactgtctgcagacgctgctgcagcatctgacttcgcacagcctgaccatcgtgagcaacgcgtgcggcacgctctggaacctgtcggcccgcagcgcccgtgaccaggagctgctgtgggacctgggcgccgtgggcatgctgcgtaatctggtgcactccaagcacaagatgatcgccatgggcagcgccgccgccctgcgcaacctgctggcccatcggcccgccaagcaccaggcggccgccaccgccgtgtccccaggcagctgcgtgcccagcctgtacgtgcgcaagcagcgggcgctggaggccgagctggacgcacggcacctcgcgcaggcgctggagcacctggagaagcagggcccgccggcagccgaggccgccactaagaagccgctgccgcccctgcgacacctggacggcctggcccaagactatgcttccgattcgggctgctttgacgacgacgatgcaccgtcatccctggctgcggccgcggccaccggggagccagccagccctgccgcgctgtccctcttcctgggcagccccttcctgcaggggcaggcgctggctcgcaccccgcccacccgccgaggcggcaaggaggcagagaaggacaccagtggggaggcagccgtggcggccaaggccaaggccaagctggcgcttgcagtggcgcgcatcgaccagctggtggaggacatctccgccctgcacacctcgtccgacgatagcttcagcctcagctctggagacccgggacaggaggcgccacgggagggccgcgcccagtcctgctcgccatgccgcggcccggagggcgggcggcgagaggcaggaagccgggcgcacccgctgctgcggctcaaggcggcccacgccagcctctccaacgacagcctcaacagcggcagtgccagcgacgggtactgcccacgcgaacatatgctgccctgcccgctggccgcactggcttcgcgccgcgaggaccccaggtgtgggcagcctcggcccagccggcttgaccttgacctgcccggctgccaggccgagcccccggcccgcgaggccacctccgccgacgcccgcgtgcgcaccatcaagctgtcgcctacctatcagcacgtgccactgcttgagggtgcctcaagggcgggtgcagagcccctcgcggggcctggaatctctccaggggcccggaagcaggcctggctgccggcagaccacctgagcaaggttcccgagaagctggcggctgccccgctgtctgtggccagcaaggcactgcagaaactggcggcgcaagaggggccactctcgctgtcccgatgcagctccctttcctcgctgtcctcggccggccgcccaggccccagcgagggtggtgacctggatgacagtgactcctccctggaggggctggaggaggccggccccagcgaggctgagctggacagcacgtggcgggcgcccggggccacctcgctgcccgtagccattccggctccccggcgtaaccgaggccggggcctgggggtggaagacgccacgccgtccagctcgtcggagaactacgtgcaggagacaccgcttgtgctgagccgctgcagctctgtgagctcgctgggcagcttcgagagcccgtccatcgccagctccatccccagtgaaccttgcagcgggcagggcagcggcaccatcagccctagcgagctgcccgacagccccggacagaccatgcctcccagccggagcaagacgccaccgctggcgcccgcgccacagggtccccccgaggccacccagttcagcctgcagtgggagagctacgtgaagcgcttcctggacatcgccgactgccgggagcgctgccggctgccatctgagctggacgcaggcagcgtgcgctttaccgtggagaagccagacgagaacttctcgtgcgcctccagcctcagcgcgctggccttgcacgagcactacgtgcagcaggacgtggagctgcggctgctgccctcggcctgccccgagcgcggcgggggcgccgggggcgccggcctccactttgcagggcaccggcggcgggaggaggggccggcgcccacgggttctcgccctcgcggcgccgcggaccaggagctggaactgctgcgggagtgcctgggagccgccgtgcctgcccggctgcgcaaggtggcctccgcgctggtgccaggtcgccgcgcactccccgtgcccgtctacatgttggtgcccgccccggccccggcccaggaggacgactcctgcactgactccgcggagggcacgccggtcaacttctctagcgccgcctcgctcagcgacgagacgctgcagggaccccccagggaccagcccgggggaccagcgggcaggcaaagacccaccggccgccccacctctgccagacaggccatggggcaccggcacaaggcgggaggcgccggccgcagcgcggagcagtctcggggcgcgggcaagaacagagcagggctggagctgcccctgggccggcccccgagcgcccccgcagacaaggacggctcaaagcccggccggacccgcggggacggggcgctccagtcgctgtgcctcacgacgcccactgaggaggccgtgtactgcttctacggcaacgactcggacgaggagcccccggcggccgcgcccacgccaacccaccggcgcacatcggccatccctcgcgcttttacgcgggagcgtccgcagggccggaaggaggcccctgccccgtccaaggctgcaccagctgccccgccgcccgcccggacccagcccagcctcattgctgacgagaccccgccctgctactccctgagctcctccgccagctccctcagcgagcccgagccctcggagccgccggccgtccatccacgaggccgggagcccgcggtcaccaaggacccgggcccaggaggcggacgcgacagctcgcccagcccgcgggccgcggaggagcttctgcagcggtgcatcagctcggccctgcccaggcgccggccccccgtgtctggcctgcggcgccgcaagccccgagccacccggctggatgagcggcccgcagaggggtcccgggaacgcggcgaggaggcagcgggctcggaccgggcctccgacctggatagcgtggagtggcgcgccatccaggagggcgccaattcaattgtcacgtggctgcaccaggcagcagctgccacgcgggaggcctcgtccgagtccgactccatcctgtccttcgtatccgggctgtcagtgggatccaccctacagccccccaagcacaggaagggacgacaggcggagggagaaatgggcagtgcccggcggccagagaaaaggggcgcagcctcagtcaagaccagcgggagcccccgttcccctgcaggccccgagaagccacgtggcacacagaagaccacgcccggggtgccagctgtgctccggggacgaacagtgatctacgtccccagcccggcaccccgtgcccagcccaaagggacccccggcccccgcgccacaccgcggaaggtggcgcccccttgcctggcacagcccgcggctccagccaaagtcccgagccccgggcagcagcggtcgcggagcctacaccggcctgccaagacctcggagctggcgacgctgagccagccccccagaagcgccacaccgcccgcccgcctcgccaagaccccctcctccagctcctcccagacctcgcccgcctcccagcccctgcccagaaagcgccccccggtcacccaggctgctggggccctgcccggccccggagcctccccggtgcccaaaacgccggcgcgcacccttctggcgaagcagcacaagacgcagagatcgcccgtgcggatcccgttcatgcagaggccggcccggcgtgggccgccaccgctggctcgggcagtcccggagccgggccccaggggccgggcggggaccgaggcgggcccgggggcgcgcgggggccgcctgggcctggtgcgtgtggcctcagccctctccagcggcagcgagtcctccgaccgctcgggcttccggcgacagctaaccttcatcaaggagtcgccgggcttgcggcgccgccgctccgagctgtcctcggccgagtccgcggcctctgccccccagggcgcctcgccccgccgcggccggcccgcgctgcccgccgtcttcctctgctcctcgcgctgcgaagagctccgagcggcaccccggcagggcccggccccggcccggcagcggccccccgcggcccgacccagccctggcgagcgccctgcccggcgcaccacctccgagagcccgtcccgcctgcctgtgcgcgcgcccgccgcccggccggagactgtcaagcgctacgcgtcgctgccgcacatcagcgtggcccgcaggcccgacggcgccgtccccgcggcccctgcctcagccgacgccgcgcgccgcagcagcgacggggagccccggccgctccccagggtggccgcgccgggcacgacctggcggcgcatccgagatgaggacgtgccccacatcctgcgcagcacgcttcccgccacggccctgccactgcggggctccacgcccgaggacgccccggccgggcccccgccgcgcaagaccagcgacgccgtggtccagaccgaggaggtcgccgcccccaagaccaactccagcacgtccccgagcctggagaccagggagccccccggggcccccgccggcggccagctctccctcctcggcagcgacgtggacggtcccagcctcgccaaggctcccatctccgcacccttcgtgcacgagggcctgggggtcgccgtggggggcttccccgccagccggcacggctcccccagccgctcggcccgagtaccccccttcaactatgtgcccagccccatggtggtcgcagccaccaccgactcggccgcggagaaagccccggccactgcctccgccaccctcctggaatagtggcctaggccggccttctggaacgttctctcccggccctgcggcgcggtctggctgccccatgggcctgcgctgtagacgtcccccataggtcgccccagggcctctgcccacccgagccccaccactctcagaacccccgcccagcgcacggcgacctcgcgcctcaccggaagaccttgcctctgtgccgcggaggtccaggaggaaacggggcggccgctaggcctcaagtcccgaccgtggagcgctggcaagggcgtcctggcccagccctgagcgcgcggcccttcccctgtcggaagccgttgcttgaccccgggcgagggaggcggtagcctccgggtccgggtctgggtctgggtccgctgcttcgcagggacagcgctggggaggtgacggcgcccgccgcaggtggggcgaggctgggggagggcggcgccgcggcgggcctgccagctgggggcctttgcggcgcgcaggggcgaagcctgtaatcactgcagccgccggtaattcgctaatgagggctttgcagggattgttttcattctcagccccagctgtgggagtgcgggtgggggtgtggccgagccccggcaggaagccccgcccagacggtgttcagggaacccggagcccaagcgctccggcggagcccaaaagggtgggggtgggaggggcagaggccaacggatccccctgcctgtcgcaccccttggcgggagacgggaaggcagcgggctgcgtacgatgggaccctggtgcagacgccgggccggctgacatttggaccccatcccagaggagatgctggctaccagctggggcgaccccaagggtcgctggagtcagtatcggcccggcgcagccgcggcgggcgaggccaatggaaaggagactgaggggagtcccggcagtgagcccgaggccctgggacctggagcccgcgctggcctctccccagcggagcctgcacgttacggagaccatcacatgtgggcgtggtcagtgcccaggaccgcaccgctgctcatcttgtcccttttcaattcccttctggttcatgatgcataaagcgctaggccctagaactccagaaacagcacagctggggcggggacccagccttgccctccacccgaggctctgggacaaggcgggaggttcgggggccttccggcaggtgaacgcagggctggagagtatttggtgccagatgaggtgaaagcttatagaagggcctgaggggctcggctgcctcatcccctggcgggggaggctgggagctgggcctcctgcgtggggtgggactcgcaggggccgggtctccgtgactggggcaacgcctcgtcctgcagagggagccgacgacctcttttctgcagaaaagctccagcaggcgctgccttcacccacggatctgcccaggctgaaggcacacgctcaatgccccacgtgccttctccaggaggaacgaagcagggtttgagggttgggtggatggagctcagaaggaaaccccagccccaccacggatgacaccatccctcccgtcccatccccagcatgggcaaggccagcctttctggcagaaggagctgtcctcaactcagggccgctgtgagcaaagctgaccccagcccccacccccagttaacactgctgcttctctgaatgcatgtcacgctgcaccccatgctccgggcccacaccctgcaggacaaggagctccagacaggacgtccataagtcaccgaggtgtgccacccagcaggtgctggaggtgcccaatgctccctcctaggacctcgcagccaggcaaggctgtcaggttgttttgggggaagagggggtcatggatggctgagcagagagcggggaaaatgcaggctgagtggggcgacctcctgcctgccaggagccccctttcaggacacagcgggggtctcacacttgctgtccccatccatggcccgagggggaacctggtggtctcttctgagcttttggacttggggatgccaaacacgtgctcaccctcacactcgccccggcccgctgcgcccctaattgccaaagggtagggaaatggcgaagccagccaccaggtcgctggtgacagggccagggttatgcaggaaggtggtgcggcattgccttccacatatgtaagtctctgggcggcgccctcccagctccctgcctctgtttccccatgtgggccgtggggaactcccagagctacctcttgggggagcgtggtggcagcgatgatggggagacgcctggaagctcacagaacttgggtctggctggctcctgcccgtgacgccttgcccagcagcaaggtgcgcaacatggctgccagccccgcctcccacccccaccccgagtcctgagctcactttcgccttctccatcccctgccgtgggggccacagccacacctcaccgcccagtccagctgtctccagaaggggacaggcagtccgcggtctctggacaatcaactcaaggtacgcccactgcaaggcctccctcccaccgcggcccctgcctggccacctggcctctctgcaccagggtgacaaggggtcctcgtctgccccccaatgctccagggccagtcctaaggagctgagggtctgaggacgcagggagggtggaggtgtcctgaggctgatggacagtgaccgccactggcccccaacatgaccacacgtgggtgctgaactcggggcgccgtgcccaccggcatggtcctcccgagctccgacagcattacctcacccggccccatctgttgccccggtccagccctgatggcgcgcgcctggtctgtctgattcccctagccgccaccccacgtttctgtaccgggtctctgcagtgttaaacggacgtgtaaatagtggtaaatagtgaaagcctgtccttccctaaatgtaaagccatctgtccggcgtaaggacgacaccgtcagctgtccgactcgcacacatttaataaactgagctcttgcattgcctgccgccatcacctcttcctcaaaatgggctgtgggcgggtaggttcatcgctgtctatgtgctgccacagaattgctgagaccccccaggttagatccctggaagcagagccagaaagcagaaactgggggcacagggtttgtgggcaccccacccagatgggccggggaggcactggctgaggccaggagtctccccctggtcccaagggagggcaggctccagggggtgcacagcaccccagacagggggtccaacctgggcattggtacctgggccagttattatggcaggccccagtgtggggcaggaggcacccatgagccactaggagctgtggctggtgcaacagctgggatggggcagccacagcagccactaccggggagagtcaatggtggacaggggctgcgggagctgggacggccccacgtcaaagccacttcagggagcacagccctggcccagctggggggacaaggaaagctatgactgcaagcagcacagaagtgcagggtgggaagggatggcaggagccggccccctccccaccttccaccctgggacactgccgggacctccctcggccaggtgagcagcttcagaagcatgaccagtgagaagtccctagggcccaggccgggctagccaagtcccagtttctggatgaggcgcctcccaggctgtgtgtggcaggccccctttcttcagggaataagaaacatcttccacattcaagaaacaaagctggctgtgggtctggagagagggtgaggcagccccaggtctctgggtcaggcggacggtccctgcatgcagtgcccggcaggactgagcagggttcccggggtcgccggtacccatccctccccagcttccggggccccgggacggagccgctcacagaggcaccattcagacggccagacacacacgaaagctttatgtgcagggcccagcctctgggccgccttgcccaggtttccactcaagttgctatttaggatgaaaagcctttggcaagaccctccgccgcactaacgccccctcccccagggccagaacccgcagggaagcaggcccaggacctgctgcagctggcagggtggctatgagactcaggacaccctgggctcctggccagtgactcacagcggtcctccagcaagggcagtggctgggagacacccgtgccgtggagctaggcccagcctggctgggtctcagggctgcttctcttgggtgaccccagcggcccagggtcgttgtgaagatcaacgtggcttgtgggaggagcccggggcccagaaggaagtggggtcaggggctcaggctggccctcgggctgctctgacattgggtgggcactcgctggatggaatcacagttaacacctcgatcccaacacctggactcagaagtggacaggcgagtgcctgccccgggagaggaaggaggtggcacctgctcccaggggccccactgcagagcacggccactgtgagctgacgacagaatcacagtacagcaataatgtccctatcctcttccagaaccccagtggggccctcaggtcacgcaggacggagccagctgggtgggtcccaccaactcggcatgaatgagacgacggatgaaccgcagccccagcatcaggaggggcgcctgtgtcaacacccacgtgggctgggaccccgtgaatgccagtctggggccgacggacccccagggaaagcctgggtgcaggccaccttgtgcgctgcccaagcctgcaggccccgagaggtcagcctgaggaggcagcctcggctgccggtaatgctgcctgcttcatctgggccacctcccgctccaggtcctcgccggctcgctgcaggagctcacacctctgcctcagcacgttgcccgcctgctgcagccgctggttggcagccacgtaggcccggctttgctggtagagctgctctcccggggcctccgcatcctccatcatcctgaagggaactggggggtctgagacaggacacagcagcatcactgcctgctgaccaccccatcctcctgggcacccctcactactgcccccaaagggcagggttccctgcagtccccgagtgagcttgccagccggggtcttcttaacatgacggatgcagccaggtgtggtggctcacgcctgtaatccagcactttgggaggccgaggcgggaggaacacttgagcccaagagttagagaccagcctggacaacatagtgacacccccatctctaccaaaaaatacaaatacaaaaattagctgggcgtggtagcacgcatctgtggtccctacttctctggaggcagaggcaggaggatcgcttgagactgggaggccgaggctgcaataagctatgatcgtgccacggtactccagcctgggtgacagaatgagaccctgtctcaaaaataaataaaaacaaaaatcaagtaatggaggcttcctcgtccatcagctgggagaggcacagtggctgggtggcaggaggggcttccagctctaggctacccgccttagcaaagcgtgtgaccagggggatcgggtcacagaaagagctcaagcctcgccagcagtggccctcctgggggcggggcttccattcctgcaaaagccgtggcacccaccgggatggactccactgagctggcctggctctcattcctgctgtctctggaagccagagacgcaacaagcccgccaccgaaaacctctccaggggccgtgcaacctcctggagcacacacttagggaggcaggggtggcgaaggtgagaggtgggcattgacgtcctggtgactcccacattcagcagaaactacgtatggctccctgctcccccacgtatgcaagcccagtgcagcagggctgaagcagcaccgacttcagggtcactcagagaagcgtcaggggcccctcggctctggcctgcccctcggcagtgtggtctcccacggacgaaggctccacgtgccgcacgggtctgggctgatcaaatcacctctgtcatcacctgctttagcaacagggtgggaaaggccgggcagtgcctggatgaaggcacaggaggccccctaccttctgtgagcgccccccgtcccccgcacagcgtgcctcagtttcgccacactcaacggccatggacctgagcccatgaagctcaaaccacggccccagcaccctcaggtgaccgaactgcatgctgggaataaaaccaactcatgcaccttgaccagtaccggcccacagaaccttccagatgatgcgcacacctcccaccgatgctggtccacaccagccaccagccatgtgtggctcctgggcacttgaaatatgtctaaagggaaaacacaactcaatttttctctttttttctttttcagagacagggtctcactctgtcactcaggctggagactccaactcctgggcgcaagcaaccctcctgcctcagcctcctgagtagctaagaccacaggtgcatgccaccacacccagctagtttgtgtatttttggtagatataggttttgctatgctgccaaggctggtcttgaactcctggcctcaagtcatcctcctgcctcagcctcccaaagtcctgggattacaggcatgagccactgcacctggccccagaattttctaatattactttttaaaaatgttcccttagaaattcacagtttctatcattccacatggctcattttcttttttcttttttttttttgtttgagatagagtcttgctctgtcacccaggctggagtacagtggcacgatctcagctcactgcaacctccgcctcctgggttcaagcaattctcctgcctcagcctcccaagtagcagggattacaggcatgcgccaccatgcccagctaatgtttttgtattctcagtagagacggggtttcaccatgttggccagggtggccttgaactcctgacctcaaatgatccgcccacctcagccacccaaagtgctgggattacaggtgtgagccaccgcacctggccgattcatcttcatttgtttcccgccagccccagaacagcctggggcagacattcttgtttcttttgttcacttgtccattagcagtgctctaagcgcagagcccagcacacaggaagtgctcaagaaaaggattgttgaatgaatgaatgagcctcatccagaacacaaaattcacccaactgcactgctgaatcctttggtctctgactagcttccacctcgtaaatcaggagtggacaagctttcctgccaaaggctggagtctctgctcccactactcaactctgcccttctggtgtgagagcagccactaaccgtatgtgaatcatttggctgtgtgccgtaaacctttacttaccaacactgaaatctgaatttcatacctctttcaggtgtcagaaatgttctttttcacccacccccatttaaaaatgtgaagtccattcatagctcccagaccttaaaaaaacagccaggggcagggtttggggggccctagcttaccacctctgttttactttatttatttctatttattaattattattataattattgaaacagagtctcactgtggtccaggctggagtgcagttgcgtgatctcagctcactgcaacctccgactcccaggttcaagtgattctcctgcctcagtctcctgagtggctgggattacaggcccatgccaccacacccggctaatttttgtatttttagtagagacaaggttccaccatgttggccaggctggtgtccaacctctgacctcaagtgatccacccacctcggcctcccaaagtgctgggattataggcgtgagccaccgcaccggccacttatttatttttgagacacagtctggctgtgttgcctaggctgtatcctcccactttagcctccaagaagctggggctacaagtgtccaccaccacacccagtaatttttttttttttttgagacagtctcgcactgtcacctgggctggagtgcagtggtgcgatctcggctcactgcaaactctgcatcccgggttcaagcgattctcctgcctcagcctcccgagtagctgagattacaggcgcctgccactatgcccagctaactctgttttgtttttgtttttgtttttgttttgttttttcatttttagcagagacggggtttcaccatgttggccaggctggtctcgaactcctgggctcaagcgatcctcccgcctcatcctccgaaagtgctgggcttacaggcctgaaccacagcgcccggcctccacccctgtcagaagaaccctctgaaaatcggtcccactctacggaggagtagagggagactcggagaggatacggaccgtgcccatgttgcgggggttcccagggcgtggggtcaggagttaggggtgtgcttctctcccgtccccttgctgccggggtctcaggtccgcttttccccgggaccgggctccccctaccttccggggccaggatggtgaacactggatcctctgccggcgcaccccgcacatcctccaggatctgctccaccgtggggggcgctgggcgggtgggcagcagcacgcgcttctttgccttggagcccatctctgaaggcggggaagggggcgctgaccggggcgtccacctctccgcccttgcccgggctgctcctcccgcccagcgaactcgtacgcacccgtcgcggtcccgctcccggggaagcccgccctgtcccgcccctctgagctcgccccaggccctgaccctccctccgcccaaaaacacggtggccaaggcttcagggtctggctcaacctctgcctcagtttccccgcggtcaccccagtcgccggcctcttcccacctgggcgcgggacccgaaagcccagcgtcgacgacgcagccacttccgattccggtcggagcaccgccccgtccccgaacacgtgacacacacttccggcctcctctcccgccggcccgccgctcatcgcggggctccgccccgtcttaaagggatagtgcccttgagactcggatctcagcctctcaggcgaacccgaacctggacgcgctacgatgagagcgagttcgagtccaggctccactggctgggtagaaaagcatccgaggctcgtctttctgaaaaggggaacacggcactaggggacacgccacccatgtggctgacgggagcacaaaattgctgtccacctaagggagcctggtggtgcatgagcactcggcggccggaacacagcgggggcggggcggtcgcggcgcctccacttccggccaaggcgggtcctcccacctcggggacggtgctggaggtcaccttttcctctccgctgatgcctgggaaggcagaaagagcagagggcccttttcctctctcaggggctttattgagatgcagtttacataccataaagttctcctgtttatttcgttttgttttgtttttttagagacagagtctcactgtgtcgcccaggccggagtgcagtggcgtgatctcagctcactgcaacctccgcctcccgagttcaagcaattctcctgcctcagcctcccgagtagctgggactacaggcgcccgccaccacgtccgtcaaaatttttttttgtattttagtagagatggggcttcactgtgttgcccaggctggtgtcaaactcctgagctcaggcaatccgcccgcctcagcctcccaaagtgctgggattacgggcgtgagccaccgcgcccgg[136 bp omitted]ccgtctctactaaaaatacaaaaattaggctgggtgtgttggctcacgcctgtaatcccagcgctttgggaggccgaggtgggtggatcacgaggtcaggagatcaagaccatcctggctaacatggtgaaaccctgtctctactaaaaatacaaaaagaaaaacaaaattaaccaggcatggtggcggttgcctgtagtcccagctactcaggaggctggggcaggagaatggcatgaacccgagaggcagagcttgcagtgagccgagatcgtgccactgcactccagcctgggcgacagagcaagactctgtctcaaaaaaaaaaatattgttgagagagaaggaaggaaggaagggacagagagagggaaaaggaaagaaagagaaagaaaggaaagaaggaaggagaagaaaaaggaaggaaggagagagagaaagaaaaaaaagaaaaaggaaataaagagaagaaagtaaagaagaaaagggagaaaagaaaggaaaggaaggaaagagaaggaagaacggaagaaaggaaggcgagagagaaagaaaaagaaaagaaagaggaagaaagaaaaaggaaagagaaagaagga[172 bp omitted]aaaggaaggaaagaaggaag[137 bp omitted]atcgcaccactgtactctagcctagtcaacgtagggagaccctgtctcaaaacaaacaagaaaaaaaacaaaggaatcaccgcaggagaggattctgggccatggtgagccatgttctggggctggacattactgctgacccccggccattccctgctgttcccactgcctggggtccctgggcctgggcggactctttctccgtggccggctgcattctccatggactgatgtccggggaccccaagcagaaaccacctgagccctggggcctcgggcccaccctgctccagaggaggccacagactgagcaccttctaagcaacctttatttgcaaactctgaggttggacgcggtgcccgaggcggacagtgtcacgtttctctccctccactttcccctggcttttggggtgctccagcctctccccccagcccactcccgcccaaacccaaaatgcagaggagacttctctctctctctctcccgccaggcttcggggttccacggggcccatccctggcaggccaggcgtcgggtgctggtgctcgctcctctggggccagcctggggaggcagcatggcagcagtgcctgtcagggacccaggcgggggcaaggtcgctttctgagctgacaacttcaggttccagctggcagccagacctggggtttggtgggggtggccctggcacgggagagccaggcgtatagtgggaggtccatggacatgccgcagaggacggggcctccgagggtcacggccaggaggctcagcaccatggccgaggctgggcagcggtggtggggacaggcggcagctctaagccgggggcggctgtcgggggtggtgggtcccatgcaggagccctgctgctggtccagcgtggaggatgggggacaggaggtgcagtccctcggggagccgccgcggcaggtgtagcaggaggcatggcagctggagcagaccctcagcgcgggcgccgccgtgtgcccaggcccagcggtcaccagccttgtgtggttgaagaaccgcggggggcagtaggccaggcagagctgtcccaggatgtaggcggggccgtcacacgctgctcggggacacgcacgcaaaggcccgtcagcttgccacccgcagcctgttactcgccacccgcccgcctggggccacatgcacgctgcccacggtggccgccaccgcctcccagcagtgggccctgccccgccggcactcaccctggcacagcccctctgtgtcccgctgcacacacgcgctgctggtcacctgggggcctgtaggccgcgctgtcatgtcctcggccgtcccatagagcagcagcgtgtagcggtacaacgtccctggacaggggtcgcgggtgggcacaggaggaaaaggaggctctcggcagcctggtcctggtagtccccgggctccctccccttcagctcccacgcggggccctggactggttcacatctctcagggaattgcacacctactgtgcgcctgtcactggacaccgacatctcccgggtgactgcacacctactgtgcgcctgtcactgggcacctacatctcccgtgttaccgcacacctactgtgtgcctgtcattgcacaccatctcccgggtgactgcacgcctactgtgtgcatgttctcttggagaaggccactgggaaccccttttgcagtgcggtcaccaaggctagctccagagcccctggggggaggttggagagccaagccccgcccaccacagccccgccccgccctcacccgtgttgaaatagtagcccttgttctctaggcccagggtccacacgccctgtgggttctcatcccagaagtgggtggacatgaagacccagttgttgtagccttcagtgctgacgtccaagggtctgggacagaagggtgggtgggggtgggggtgtcaagagggatggctttgtgaagccggcagagccccatgaagtgtctgaccgcacgcgctggtggccgcgtgtcctctgggtgtgggtgagggtgtgactcggggtcccaccaactaggctgccgtgtgactcctatgggcctggcccctccccgtgaggacactccgggtagatggcagcgtttaccgacagggcatgaggccgccccctctcctctgcgggccgctcaccgtatggccacgagtgtggagcgcgtgcccatggggctggtgagcgagatctccaggtctccgcgccggctgtaggacagcgtcagctgcgcctgcacgtgctccagcgagcggatggagttgtggaggccggcgcaggccgatacgttttccctgatgtagatcagcggcaggatggggctgagggggtcgaggggtgaggaccctcctgcggcctgctggggggtgggtgggcggccagcaggcgaggtcggggctcagaggtcacggggtccagccctcgttttacagatgggtaaactgaggcctcaggcctgtcccccacacccccagcggggatagcggaggggcgcgcaggggtctcacgtggggcggctctggacccggacggcgcacttcctctgcggctgggtgggcagccaggtgcgggcggtgtccaccagcagcccggcgtccagcagcccgtatccgtagtgatggctcactgcgcggaagggcagcagtcactcgccccgtgggccccgggtccccgcccccgcccggccccgccgcaccttggcgccccacgccgttggtcctccagtcctcggcctgcaggtgcgccggcttggacgcgcggaccaccaggtgctgcatgtctctccacgtcaggaacgggctgcggggggcgggggcgggggcgggtgagccgccgggccgcgcctgggggcgagggcggtggaccgggccccgcagtcacctacttggcctccagcgctagggcgatcatgccggccgccagtggggctgaggccgaggtgcccgtgtgctggtctgtgcacccgtgatgcaggtccgtggtgacctgagggcagaggggggtgggactcggggggccgtgcacagtgagaatacagcccttcttcaaaaagtaccaaggactgggcgggcgcagtggctcaggcctgtcatcccagcactttgggaggctgaggcgggcgtgttgtctgaggtcaggagttcaagaccagcctggtcaacatagtgaaaccccaactctacaaaaatacaaaaattagccaggcatggtggcgggcacctgtagttccagctactcgggaggctgacacaggagaatcacttgaacccgacaggcagaggttgcagtgagcggagatcacacccacgccactgcactccagcctgggcaacagagccagactctggattaaaaaaaaaaaagt[131 bp omitted]tgtctctactaaaaatacaaaaaaattacccgggtatggtggcggggcacctgtaatcccagctacttgggaggctgaggcaagacaatcacttgaacctaggaggcagaggttgcagtgagccaagatcacaccgttgcactccagcctgggcaacatggcaagactccatctcaaaaaaataaaaaaatagtaccaagaactgaagtcaaaaagtaccaaggactggccacacagtggctcacgcctgtagtcccaacactttgggaggctgaggcgggcagattgtttgagctcaggagtttgagaccagcttgtggcaacatggtgaaaccccgtctctacaggaaaaatacaagaattagctgggtgtggtagtgtgcacctgtaatcccagctactcaggaggctgaggcaggaggatcgcttgagcctgggaggtagaggttgcagtgagctaagattgcaccactgcactccaacctgggtgacagagtgagactctgtctcaaaaaaatttaaaaaaaaaggtaccaaggactccaaggactgagttcaagaagtaacaaggactatgctcaaaaagaactaagagcctggccaacatggtgaaaccccgtctctactgaaaatacaaaaaaattagccgggcatggtggcgtggcctgctattcccggcactttgggaggccgaggctggtggatcgcttgacctgaggagttggagaccagcctggccaacatggtgaaatgccatctctacaaaatatacaaaagaaattagcaggacatggtggcatgcttgtggtctcagctgctcaagaggctgaggcacaagaatcgcttgagcccggcaggcgtaggttgcagtgagctgagatcatgccacttcactctgttgcacccagcctgggtgacagagc[131 bp omitted]aaaccctgtctctactgaaaatacaaaaaattagccgggcatggtggcgggcacctgtagtcccagctactcaggaggctgaggaaggagaatggtgtgaacccgggaggcggagcttgcagtgagctgagatcgcgccactgcactccagcctggacgacagagccagactccatcttcaaaaacaaacaaatgaaaagaaaccctgggctgaagtgattctcccactttggcctcccaaagtgagctgttgcgcccggctggatttgtttttgttttgttttgttttgttttgttttgagacagggtctcgctctgtggcctaaactggagtgcagtggtgcaatcttggctcactgcaacctccatctctggggttcaagcgattctcctgcctcagcctcctgagtagctgggattacaggcgcccgccaccatgcctggctaatttttttttgtatttttagtagagatggggttttgccatgttggctaggctggtcctgaactcttgacctcaggtgatccacccaccttggtctcccaaagtgctgggattacaggcgcgagccactgtgcttggcctggatttgggttattgattgattgattgattgatttttgagacggagtctcactctgtcgcccaggctggagtgcagtggcccgatctcggctcactgcaaaccctgcctcccgggttcatgccattctcctgcctc[214 bp omitted]ttcaccatgttagccaggatggtcttgatctcctgaccttgtgatctgcctgccttagcctcccaaagtgctgggattacaggtgtgagccaccgtgctcggcctggatttgcattttcaaagcagctttgggagggtgctaagtcacagtggtggggacaggaggaggccaggctgggatggcagggcctggggaggggaccctgttggggcggctgcactcacgatctgggggtcggtggccacgccgctgctgtaggtggtggtgagggtggaggcgcaggcttcgctgtaccagggcacgcggccctgctgggtggtgctgcccacggaaagcgtgtggatgctgttggtgtagccgtcgcagttgcagttgtcgtagtgcaggccgccgttgcccgaggcccagatgaagagcgtgcccagcccgccgcggccctgggaaaccaggaggggcggggagggggcgtcggcctggcctgccacccctgccctcctcgggctgccactcaccttggtcacaccacgccggaaggcctcgcgggtgaggatgccggggccgtccaccgtgcggccgtcgtcctcgggaccccagctggcgctgtaaatgtggatgtgctgcggctgcaggctcagcgactgggcctcgatgacatcggtgatggtaccgtccagcatccgtacgcctgcagagccagggcgggagggccgctgccaccggccctgcccttccccacaccccagcccgccccgcgccactccacaccactccccagccctacctgggccctctctctgctccctggagtgggaccattcgtattggctcagcaccccccaagccctggagtctggggccctagcaccacccagcagtgagagggtgggctcccgagtccttgggcccagctccccgccagagtcacccccttccctctctgtcccggaatggtgccgctgggggaccccgggtacctccgattcgggcgttgaaagcgacccccacaccacagaagccattgttggccatcgcggccacctccccagcacagcgggtcccgtgcctggtgccagggccaagaggggctcctgtcacggcctccatccccctgccgggtactggggcttcccccgtgtgctgtgggagccctgctcaccggttctctttgctgggggtgtagcggggctgggggtccgggtcgtagtcattgaagtcatagctggccagggggtcctgggggcaggtggggatatgagggggccgggaggcgtccctagggtggtgccagcctcggcacctggggcagccctcgcccacagccacccgcggtctcacgtagttggcccagaggtccgggtggtccttctcgatgccatcgtccagcacagagaccacgatgccctggcctgacagcccctgactccaggcctgcaggatgctcaggtctggttgggcctcgctgttctgcagggggaggcggggttgtgaccctgtgagggcctggagttgagggcgccagcggccccgtccccgtctacccaccctggctgcctgctcaccatgtaccactgcttggagaaccaggggtccgtgggcaccacgacagagcgtttcacccgccgctgcagcgtctgctgctggaaccactgcacctgcagagcagagggtgcatcaggcctgtcccctgctcgcccctggggcccctcgtggttcagggagtgaggcagccccgtgccctgggaccctgtgtttgtgggggttgctctccagggtccccatgtgcctggggctctgtctgcagtcggaaggggtcgaggcttttggaccacctgtccttgggcccacagacgcgtcgttgctgccgcgggtgactgcaggtccccgggtccccaccccactctctcccccatccctgttctagatccttctatctctctcctgcatcacttccttattttttttctttttttgagacagagtcttgttctgtcgcccaggctggggtgcagtggcgcaatcttggctcactgcaacctctgcctcctgggttcaagcgattctcctacctcagcctcccaagtagctgggactacaggcgcacaccaccatgcccggctaatttttgtacatttagtagagatggggtttcgccatgttgatcaggctggtctcgaactcctgagcttaagtgatctgcctgccttggcctcccgaagtgccgggattacaggcatgaaccaccacgccaggcctggcttctctcttgcaaaccacatcaggaactggccactgctctccctcccggtgctgtaagcaggcagctgtccagtcctgttcaaggcacttcctggcctccgagggcttcccaggctccatcccaacccctcagcttgacatcccaggcattttctagacagggcccagcccgatgggacccaggcccctttctgagcgcctggacactgcgtcctgagggc[132 bp omitted]tctcctgcctaagcctcctgaatagctgggactacaggcgcctgccaccatgcccggctaatttttttgtattttcagtagagacagggtttcaccgtg[139 bp omitted]cccttccctccatcccatgacctagacggtggggaagtcacgccgtctgtccctccttaccagagcccctggggcccagaggagggagggggaggacaagaggtgcccactgtgtaccaggccctggcaggcgccatgatttccgtatctgggtcttcctgcctcctcttgctgtatagacttggggcccgggcgggtctgagccacagaaagcacacagctgttcataacaaccacgagaaccacagaagatggctggtggccccaggaggcagctgagaccccgggcagggggttggcctccaggccaggctcaccttggggtttttcttcaggtgcaggcggtggccccagtgcggggtcagggactgctggaccacgccccggtgccgcaggtgaaagtactgcccgtcagggaagatctggggatgtggggaagcggccgcaccgatgggacccggctcccctgctgaagcccccgagggccggtaacagcccccttctttgtccttccccagcaggtgctctctgggagtcccagaagctgagcttggctgaggcaggggtgggctgggactcttgatatttagaagaccttgtgggctccctcccccttgtcggggtctagggttgttcagtcccctccaagcccccacttcccgtctatcccggtcccacccaccggccccaggttgacgaagccgaatttgcgtgccaggcgctcgacctcccggttaccctgggacacctggacggcccagctgctgacatagatgggggctcggaccggggcccaccccacagcccgggggcggacaagggccagggccaagaccaggcgcagccacagcgcaatcggggcgggccgcatggaggcggggcgggagcggggcctgcgcaaatcccctccctcccgccaaaccgccgagtgggcccaggcgtccgacccgcccccggcgccatagcaacgcagaaggcttcgactcccagggggccttgcggctactcagccaggaggggcgcgaagatctaacagaagcgggagagggacgcacgcctgcccgtcttccgcagacccacaccctcgggagcctcagttttcccatttgtacaacgacaagactaacccagagaagcgggttcactgttgcgataacgcgtcctaccctttgtttgacctctcccactttccaacacacccctccttcgagaatcagcccggcctcctgtccggcctaatcagaatcattcttttgcgtaatcccgcctcctccgataagcctcgccccgttcccgcccctaccattccgccctgcctcctttgtgatcagccccgccctccactggtctcgccaatgaatcgcgtcccgtttctccaatcggctcggatgtttctttagcccctccccccggttccgcccccccacgcctctcctcgccctggctccacccttcagccaataatcccatcctctgacaccgcccttccaatcagctacgtctcgctccggcccggccaatcggtgccctgggccgccgcgccccgccctctcccggcggggtctgggcagcggcggccgtggcggagggctatgcggcgggggagacggggcaggcccctcctcctttgtccgccctgccctcccattggtcctagcggggggccgggggcggacaccggcgcggggccggagcatcgcggctcaggctgcgggaaagcggtgcgcgtgcagcggggtgggtgccctggtccgcgggcgagctcgagcagccaaccccgggcgcgtcggggccatggacggcctgaggcagcgcgtggagcacttcctggagcaaaggaacctggtcaccgaagtgctgggggcgctggaggccaagaccggggtggagaagcggtatctggctgcaggtgagccgtcggcgctagcccgtttcgccgacgggcacaccgaggccatgggcctgggggtcgcagaccggactccttccccggctacggggtccggtccggccggtggagcgcgcgaggtgactgggacctcgaggtccgcccgcagcccttcccttgcccgcgccctgcgaccctgctcccgggccacccctctctagcttccgcccctggccgccccccgacgcctccttccgggcgctgggtgcctgccatgccgaagtccggttcttccagttgcccagtggccccagaggggtcgggatgccagtgtcctgcgcgtttcgccgtcccccttcccccgtggaccccggcctggctgcaacagtagagatcttcccgtttttctgaggggaggctcctggcgggaaggggaacggaccgtcctgggggcctgcccaggacccttctcctttcctcctcctctcctgccctagctcaccttcccccagctcaatggcttagtgccaccgagcgtaaatgtttgttaagacggagttgggttgtctgacggctgtgatgtggggaggctggactggggcccacagagccggagatccaggcaccccgattgtgactccattacagttcttccgtgactttcacccttggtgacgctgcgcgccccttcccctttccaaatctctagcaagagcatgtagtaaacgctccttaaatgcctccctccccacctttaaaacttttttttgagaccgagtcttgctctgctgcccaggctggagtgcagtggtgtgatcttggctcactgcaacctccacctcctgggttcaagcgattctcctgcctcagtctaccaagtagctgggattacaggtacccaccaccatgcccggctaacttttgtatttttagccgttcaacatggtgaaacggggtttcaccatgttggccaggctggtcttgaactcctggcctcaggtgatctgcccacctcggcctcccaaactgctgggattacaggcatgagccaccttgcctggcctaaaactttttaaaattaacttttttaagagacagggtctcactatgttacccagactagtcttaaacttctgggctcaagcgatcctcctgcctcagcctcccaaagctctgggattacaggtggaagccactgcacccagcctttcttccgtttgtgtggtgctcccagccccactggctctgccttctcttccaggaagctccgcagaatgactcacaaggacttgctctgggcctggggtattctgggtagaggacagtgccacttttttgagcaccttctgcaggtggatcccaggagtccagttcccccccaattttcccaccatctgggggttcccatgccaggcagcgccagaacagtctgaagtctgtgcccacaccctggaggtccccaggtgcctggtcccatgtgcagcgcagcaggtggcatgggcatggcccggctgtgcctgcccccgggagcaggtccctgacctctgccctccctttccacatccctggggctagtgggcaggaatttaggtcgtagagcgcccaggaggcaggcagcagggaggggctgcctggggcaccgtgtcaccagagacgaaactgaggcacagggaggcaggggctgcctctgtgcctgttctgtctgaagcatacagtcctccaccctgcccacccccagtcccatctgctgctaatcttgggggctgggcctccctccacagttctgatgtccaaggtcatcctcccgtcgctgaagctgcaggaaaagggatttaggggagggacgccctgggagagtcattcctccccacgagccaggcccggggagagatggcagtccctcatccccatctcccacctcctttaaattgacaaatcccacacccctgggtaacatacgaagaaactcagaggggacagtgactgggaggccactcctgggaccagctgggggactcctcctacccctgaccttgggtgcttttggataaagactaaagcaggtgggaggggctggggggacttgggcctctgccctttggtccagaagtggcctctatctcactctgcagatagcagccccaggggaggaggaagaaggctgtccaagctctctggagcacataggttccctgtgtgaccttgggcaacacccacccacccccagttttggctgttgaataattcaggaaaagcacaaaacctggcacacaataggcgcttaataaatgcagctgtcgtagtcattcttttcagagccaggttcaggattggggctgagctggacacacacacacacacacacacacgtttttctctgaacaccctccttgctgggactgtgttatagttgcctgaaggcacttaataaatgtgcagaaaggctgatggcggtggctcacgcctgtaatcccagcagtttgggaggcca[134 bp omitted]aatcacttgagcctgggaggcgagcttgtagtgacctgagattgcgccactgcactccagcctgggtgacagagcaagactccatctcgaaaataaatagaaataaacgtgcagaaaggcgttctctctgttaacttgtaaccataggaggcaggggccattactactcccacttaccaagggggaaactgaggctccatgcagccacagcctcactcagtgccggctggtgagtgcacacccgaccaaagggctctcctccacccaggggatcgagatgctggggtttgctgcctccaagacaggaggttctcaaagggggtagccctgccccccaccccgccccaggggacactgggtgatgtctggagatacctgtagtcgtcatgacttgggggctgatggcatggagtgggcagaggccagggacactgctcagcaccctgcagtgtccaggacagccacttccccctctccaccgaaaacaaccaagaatgacccggccctgaacatcagcagtgccaaggcagagaaaccctgcgctaagataacagatgaaacagttgcctttctcagctctagaatcaagtcttcatgacagcctggcctcccttgcaggtttctgccatcccttatattgaaacactggcctgttttcccagtgcctcccaaagggcctggaatgagatggctatcgttgcagattacacttttttttttttgagacggagcctcacccaggctggagtgcaacggcgcgatcttggctcactgcaagctccgcctcctgggtttacgccattctcctgcctcagcctccccagcagctgggactacaggcacacaccgccatgcctggctaatcttttgtatttttagtagagatggggtttcaccgtgttagccaggatggtctccatctcctgacctcgtgatccacctgcctcggcctcccaaagtgctggggttacaggtgtgagccaccgcgcccggctgcaaacacttcactgggcagctattccgcacccacccccactgcccagcgtcgagctcctgcctgcccttggggagctctcaaccccggtgggggacatggacacgttgaccagttacaggcacaaggctcagggcctagaggcacgatgggggatgtacaggcacatcaggggcagtggacatatcctggaggcggctcctgggaggaggtgacggttgcagtcttcgtcgactgaaaggcggcctgggtaccgtcgtgggggctcagcgggtccccagccctggcacaccaccgcctctctccggcaggagccgtcactctgctaagcctgtatctgctgttcggctacggagcgtctctgctgtgcaatctcatcggatttgtgtaccccgcatatgcctcgtgagtgcacggctggctgcccacgcggggggttctgggggctccctggcagcccctgaccctgctgcaccctccctgcagaatcaaagctatcgagagcccaagcaaggacgacgacactgtgtggctcacctactgggtggtgtacgccctgtttgggctggccgagttcttcagcgatctactcctgtcctggttccctttctactacgtgggcaaggtgggccctgccagggcgggcacagccgtggagcgcatggggcttggggattcctgggaggcgctggggccagaaagtccggaggataccaggagatgggggatgtgaggggaagactcagtcccttccctggggaaacgagccctgtccgggggctgatggtggagggcccaccctgaagggtgtctgatggtggagacccaagcctgctccaataggatgtccgatggtggagggctcaccctacaggatgtctgatggtggagggcccaccctgaagggtgtctgatggtggagacccaagcctgctcaaataggatgtctgatggtggagggctcacttaaagggtgtctgatggtggagacccaggcttattccaataatatgtctgatggcacagggcccacccctaaagtgtgtctgacggtggagacccaggcctgtcccagtaggacgtctgatggtggagggctcactctagagggtatctgatggcgaaaacccaggcccatcccaataggacgtctgatggtggcgggcccaccctaaagggtgtctgatggtggagacccagtgcctgtccaggatgggcatctggtggagtggtgcagcccctctccccaccaggggcacagagctgggtgggcccgcgtgtaactcctgccccgccctgcagtgcgccttcctgttgttctgcatggctcccaggccctggaacggggctctcatgctgtatcagcgcgtcgtgcgtccgctgttcctaaggcaccacggggccgtagacagaatcatgaacgacctcagcgggcgagccctggacgcggcggccggaataaccaggaacggtgggtgctcgcaggcgcctggctgcctcaggccatctcccgggtctggacctgtctctctccaccttgcctccctttctgactttggccgccccctctcactgtccgcctctctctctcacgcttccgggaaccagtcttgcaggtcctggcccgtagccgggcaggcatcaccccggtggctgtggccgggccctccactcccctggaagctgaccgtacgtaaccgctgtggggagataggagctgtgtgtgtgtgtgtgtgcgcgcgcgcgcgcgtgtgtttgagcgtatgtttgctgtgtgcacatgtattattgtgtgtgcatgttttgtcatgtgcaagagggtgcgtgtgcatgggctcaagtgtatgtttggtgtgtgagtgagcaagggagtgagcatgttttctcacgtgtgcatatgtgtgtgtgtgcccacgtgtgcatgtgagtatatgtgtgtgcgtgtgaccatgtgtgcacgtgtgagtgcgtgcgtgtgcatgactgcacatgcgtgtgctctgtgtgcacccatctgtgcatgggtgaccatgaaagcctctgtgtggttgacaccatctctgctgagggtggctgcccggcccctcgacttgtcatgctcatagccagtagcctcagtcccgcctgcgagcagctccggggagcccaggcctgcctcacggccctcccccacccgcccctctctctgcagtcaagccaagccagaccccgcagccgaaggacaagtgaagcagccccctgagcctcacaaggacctcctggctggtgaggagggggccgcgccaggctcccaggcctccacagagtcttcagcgcatcccccaacagcagcccctgccagtccctcgggtccaggcaaggccctgggggtctccttaaatgccacctcgggcaagtcccagtcccagtcctcggccacccccagctctggatcccagggccagctgccctctggctctggctgtggctcccgcctgtccggcagggcccagggccagcgtcgggcacagggcagctcccactggtctcggcaacacacccagccgcctggtacttcctccagcccctcccagtcagccctcccgtcctcggggcccctgcagccacccaacgtcacctccagcccggtctcacccatggtccagtctcccagcagcagcaacatccccacgcagccccccagcaagtcctctggcaagccggaggacgcagcccccaagaccagcggacagcgccagaaggaatcgtcgaaacagcctgccagcagcgcctcagtgcccgagctggtcccctgccattccgggacctctctggagtacacttcggagtccaccaccgagatcacctgcagctggccacaccacaggcccccgtgcctgcagcactactggtgcctgaaacacctggcctgctaggaggctccaataaagctaacccggaccagacctgtgtgccacgtgtgcggggggcccaggggaggggctgcgagggcaccgtcccatttcatcaggcatgaatcccggctgtgccgaccagccccataatatagatgaggagactgaggcccagaggctaattcacccactcaaggtccacccacatggccaggatgggtgcaagccccggaaaagcttgtccttaatcacagtgctttctctcctccctcccgaactagttgtctggcctatttgcattagcctgcttctcttaaaactcccccatttgggtgcggtggctcacacctgtaatcccagcactttgggaggctgaggcaggtggatcacctgaggtcaggggtttaaaaccagcctgggcaaaatggtgaagccccatctctactaaaaatacaaaaattagccaggcatggtggtacatgcctgtaatcccagctacctgggaggatgaggcatgagaattgcttgaacccaggaggcagaagttgcagtcagctgagattgcgccactgcactccagcctgggcaacaaatgaaactccatctccaaaaaaaaaaaaaaaaaaaaaagtgagtaggataaaccacaaaccctgatatattttcccaaggggccataactcagttattctcaacccagaacagttttgtcccccggcctttgggtcttgtctggagacacttttttttttttttattgatcattcttgggtgtttctcacagagggggatttggcagggtcataggacaatagtggagggagggtcagcagataaacaagtgaacaaaggtctctggctttcctaggcagaggaccctgcggccttccgcagtgtttgtgtccctgggtacttgagattagggagtggtgatgactcttaacgagcatgctgccttcaagcatctgtttaacaaagcacatcttgcaccacccttaatccatttaaccctgagtggacacagcacatgtttcagagagcacagggttgggggtagggtcactgatcaacaggatcacaaggcagaagaatttttcttagtacagaacaaaatgaaaagtctcccgtgtctacctctttctacacagacatggcaaccatccgatttctcaatcctttccgcgcctttcccccctttctattccacaaaaccgccactgtcatcatggcccgttctcaatgagctgttgggtacacctcccagacggggtggtggctgggcagaggggctcctcacttcccagtaggggcggccgggcagaggcgcccctcacctcccggacggggcggctggccgggcggggggctgacccccccacctccctcccggacgggtcgactggccgggcagaggggctcctcacttcccagtaggggcggccgggcagaggcgcccctcacctcccggacggggcggctggccgggcggggggctgaccccccaacctccctcccggacgggggcggctggccgggcggggggctgacccccccacctccctcccggacggggcggctggccagggtggggactgacccccacctccctcccagatggggtggctgccgggcagagacgctcctcacttcccagacggggtggctgccgggcggagggtctcctcacttctcagacggggcggctgggcagagacgctcctcacctcccagacggggtcgcggccgggcagaggcgctcctcacatcccagacggggcggcggggcagaggcgctccccacatcttagacgatgggcggccaggcagagacgctcctcacttcctagatgggatggcggccgggcagagacgctcctcactttccagactgggtagccaggcagaggggctcctcatgtcccagacgatgggcggccaggcagagatgctcctcacttcccagacggggtggcggccgggcagaggctgcaatcttggcactttgggaggccaaggcaggcggctgggaggtggaggttgtagtgagccgagatcacgccactgaactccagcctgggcaccattgagcactgagtgaaccagactccgtctgcaatcccggcacctcaggaggccgaggctggcagatcactcgcagttcggagctggaggccagcccagccaacacagcgaaaccccgtctccaaagaccttgtctccaaaagaaaaacagtggtcagtcaggcatggtggctcacacctgtaatccccagcaccttgggaggccaaagcaggtgaatgacctgaggtcaggagttcgagaccagcctggccaacatggtgaaacactgtctctacttaaaaatacagtaattagccaggcgtggtgggacatgcctgtagtcccagctacttgggaggctgaggcaagagaatcacttgagcctgggaggcagaggttgccgtgagtggagatggtgccattgcactccagcctgggcgacagagtgaaactccatctcaagaaaataaaaataaaaaggctgggtgcggtggctcacgcctgtaatcctagcactttgggaggccgaggtgggtgaatcacgaggtcaggagattgagaccatctcggccaacatggtgaaaccccgtctctactaaaatacaaaaaattagctgggcatggtggcgtgtgtctgtaatcccagctacttcggaggctgatgcaggggaatcgcttgaacccgggaggcggaggttgcagtgagccaagatagcaccattgtactccagcctggcaacagagcaagactctttctgaaaaaaaaaaaaaaaaaaagagtgttccaggcagagggcacagcctgtgcaaaggccttgaggcaggaccacgctggtgagtgggaggcacagagaggaggctcctgtggctggagcagagaaggggaggagggaggaggggaggagggaggagggaggaggggaggggggaggaggggagttttcggggctgcaccacacaggcactgggggcggggggtgcactttgtcttttttttttgagacagagtttcactcttgttgcccaggctggagtgcaatggtgggatctcagctcaccgcaacctctgcctcctgggttcaagcaattctcctgcctccacctcccgagtagctaggattacaggcatgcgccaccacacccagctaattttgtatttttagtagagacagggtttctccatgtccgtcaggctgttctcaaactcccaaactcaggtgatccacctgccttggcctcccaaagtgctgggatgacaggtgtgagccactgtgctcggcccgggactttgtcttttactcggggtgaaggatttatcagagcaaagggcaagggtaatcattaatcaccccccaccctgtgtcggtgatcacacggggatggcagacggggctctcagaatctgccgatcactggcccagctggtttgaagaatgtggtctggtcatggccctgagggaggagagagggtgccaggctcgctctgcacctggcatggtccctcactttcactggcggggagcagcaaaactggctctggcctgcccaggtcagcacacccagggagcacaggtggggaggaggacacacttgtcttaccaggtggaaatgtgacctttagcccctcaggcattttattttatttttattttgtattttttaaattttatgtttgagacggagcctcgctctgtcacccaggctggagtgcaatagtgcaatcttggctcactgcaacctctgcctcccgggttcaagtgattcttccacctcagcctccccagtagctgggattacaggcgcgcaccaccacgcccagctaatttttgtatttttagtagagacagggttttgccatgttggccaggctggtcttgaactcctgacctcaggtgatcctcctgcctcggccttccgaagtgttaggattacaggcgtgagccactgtgcccagctctttttatttatttacttttatttttattttctgagatggagtctctctctgtcccccaggctggagtgcagtggcacgatctcagctcactgcaacctccgcctcccgggttcacgccactctcctgcctcagcctcccaagtagcagggattacaggcatgcgccaccatgacctgctttt[172 bp omitted]tggagtgcaacaatgcaatcacagttcactgcagcctcgacctcctgggctcaagcaattctcctgccttagctttgcaaagtgttgggattataggcatgagccaccacag[133 bp omitted]aaaccctgtctctactaaaaatatacaattagccaggcgtggtggctgttgcctgtaatcctggctattcaggaggctgaggcaggagaattgcttgaacccgggaggtggaggttgcagtgagctgagattgcgccattgcactgcagcctgggtgacaagagcaaaactccatctcaaacaataaataaaaataaaaataaataaaagaaggaaagagtggcagccaggtgcagtgtctgacacctgtaatccagcgctttaggaggctgagacaggagattcgcttaaggccaggtattcaagcccagccttggcaacatagagagacaccatctctacaaaaaagaaaagaaaagaaaaattagccacacattgtggtatgcacctgtagtcctagctacaccagaggctgaggcaggaggatcactggagcccaggaggttgaggctgcagtgggctgtgaatgcgccgttgcaatccagcctgggagacacagtcagaccccggctctaaaaaaataaaaataacaaagataacaaaacgttcgcttgtcggctttaaagctaaagcgcaaatctggagactgtttattgccgatggttacgtggttctcactggaaacaatgttgtcattttcaaatcacgctggggtcctctcgcccacgcaggaatggcgtgctcctggcggtgggggctgtgggacacctggtgcgcgtttctcccagcgcctccgtgtttctccctggccgcaggcacagcctggggtccctgttgaggaaactctccgagtgtcagctcccctggccggttgcgcagcccctagggtaactgtctgagatccaggcgccggggcagcccagggggtccgtggccgggagagaccttgaaacctccattccctgggacaccccaaaccacagccggggagaagggacagccttacagactgacaggggagggagggcagtggggtgccggcaggcaccgacagtagcctcatgagccagtgctgtcacgaggaggcctgcgagagggccccgcgtccaatgggaagcgagtgcccacgcggaagtgggctcagggcacctggggccacaagccacgaggcgcgcccggagtcccttcatgtcccgtcctgccgccagggggcactgcggcccccactcatccctgcagcacccgcggcccttggctggggagcccctgggacccccgccggcagcgcgtgctgcagacatcaatcacagaaggcaccacgtcactgaagcgccaggcctgggccgtcccaggctccgctgggtccctggtatgccgtcggtgctcaataagcacttgctgcagaaatgtgtgaaggaaaaagggggctagggaagggctccaggaaagtgtaactcccatgtcagagctgggaggggcttcgagggcatcactcactgagcgggaaactgaggctggagaggggctgcacctggcctggggtcatctgcaagatcaggggccgtgtccaccaatgtcctgcaccccttgccgactccctctgcctcggccgcctccttgcccttcaccctctctggttgctccctgcctggtgggggtagcttgtccgtgcccagtggacagcggggacccatggaccccaggcaccccaggccccagggagaaatgcaaccactggtcccacacagagtgggttgtcccgggtggcagcatgagccatgcatcaggcgtcagaggcagagggttggcaccccacggaggagggtttgctgagcgacctcgtgacaccccctagtacacacacagcccgtgtcggccctcctggttgcagaagaacatagcgggctggcagctggcagacagcagcggctctcacctgcctcctcacctggggaggggttcccagggtgggcctgagaaagtatgtggcagttgggggaggctcaggacctaccaaagccccattcattccccacctgctcctatcctcctctattccctgccctcacctcacacagtgtcagacgtgcagggaggaggtgaggctggaccaggaggaggggtggggtgcgtgtgaacatgcgtgcctacccatgagcaaggtcgagacggggttctaccagcgtgtccctgagtctctgtgaccgagtgcatgtgactggggtgcttaaaaaaaaaaaaagtgctctgcagccataaaaaaggatgagttcatgtcctttgcagggacatggatgaagctagaagccatcattctcagcaaactcacacaggaacagaaaaccaaacaccacttgttctcactcacaagtgggagttgaacaatgagaacacatggacacagggaggggaacatcacacaccgggtcctttgtggggtgggggccgaggggagggagagcattagcacaaatacctaatgcatgtggggcttaaaacctagatgatgggttgatgggtgccacaaaccaccatggcacgtgtatactaatgtaataaacctgcacattctgtacacacccagaacttaaagtaaaatttttttttaaaaagtgcttgtaaaaattaaagaggaataaaaggggggtgaacagccagtacgatagtgcatgcctgaaattccagtgctttgggaggccgaggcaggaggatcgtttgaggccagtagttggagagcagtgtgggcaacgtagcaagaccccatctctacaaaaaatttaaaagttagccgggcatggtgattcacacctggagttccagctgctgtggaggctgaggtgggaggatcgcttgagcccaggaatttgaggctgcagtgagccatgattgcaccaccgcacttcagcctaggtgacagagcaagggtctacctcagaaaaaaaaaaaaaggaggagcaagcacgtgttgatgggtggaaatccagccagaaatgctgaggctgaaaagattgtctccgagtttcctggtagccaggggaaaaggggaaattggtacgttggtacgttacagtgcctggttaggcatgtcttctaaggggcatgcctgtttgtgacagtgtctctgcccttcacacatgagggtgtgtgtgagtagcagagagcagagacagcacagtgtctgggaagtaaacagatgatcttctgggtacccagggcagcagggtgtcatgctcgttcatgacagtgtctccaagcaagtgtgacgcgcgcaaagagaaagaaagcagcgttaaactttctgagtataaatagctatgagcttcctggcagccaaggagagaggcgaaataaaagtcagagtctccttagtgcctcctcaccagtgcctgccggcttgtgacagtggctttgactgcatgcagaggtgtcttaagcgtgtgtgggagggagtcacatagctgcacaggtgggacgtatttcagagctgcctggaagccagggtgagaggggaaatacgttgacgttgaggctggtcagatgtatctttcttgctgtgtgtggccggggctcctgcaggggctcagccaggacagcgccgggcagtcaggcgtatgcggctgtcctccgcagggctccagggccgggcgtagccggcgtggggcagcagcagctggtcctgtgtgccgtcggggctgacaagacgctggacagccatcaggtagtcccggtggggtgccagcatcgggcaggggcagtggcctggcgcccacacgtactcgcgtgcccgcagtggcgagcggttcttgtagacgagctggatgcgcacctcatagcgggtctcctgggcctggtggtggtggcccagcactcgggcctggaacactgttgaggggacgtgctaagctggctggctgctcaactctgcgcaaatctctacgccccctcccttgccagaagagggactgagggtcaggtgggacctcgggatctatagggactagagtcaggatcacgtcagggatcaatgagggattagggtcaagaggcaaattaggatcagaagaaggggtcaagggtaaagtcagattagggtcagaggtcaggaggaggccaggttagtaggggctaagtcagggtagaggtcgggggtctcaccaaagtcactgccgcaatagtggagtagtcggtgggcgcggccgcgggtgtcagggcagggtgggcaggggtctgtgggatgggcggtgctgtgaggggcacaggcctcagtccccactcatcccccaccctggctgtccccacctcacctggggccagcgttggggtctgtgcaggggtgacagcaggggctgcggggggctgaggctccaccccccggggctgaggctgcctcaggggccagcccagggcctgcacacgagcctggaaggggctgtagcgctcccgagggagccagaactcaaactcgatgccagggttgggctcctgcaggaggacctggagcaggggaggggacacagggagcttcacaggaggctggggttgcctcctgcctctgaccctacgaccccagcctccccactttgatcctgtctgcccccagcctccctcctctgatgctctgtccctagctgatcccctctgaccctgtccccaccctcccccctctgatgctctgtcccagcctctcccctctgaccccagactcccccttctggccccagtcacctccactcctaccctctgtccccagcctctcccctctgtccccagccgaccccctctgaccctgttggaggcccagtggcacctgtaggagcaggtcatgggaggtgggcccggctgcttgcaatgtctcctggggccctgtgtctcgggtgtagaccacatgcgtgccggccgcctcgtaggtccctggtgggctgaccacccagtgcccattaagcacgtagcgcccatcgccccccatcagtgctgcaagggaacagtcagccctcaggaacctgtcgtctcgtctcccagaccctggggtcccctcctcaggcctcagtctccccatctgtaaacagggacaaccgcccccgggtgcccagccgggtgcctctcgcctcacatcctaggatacccaggtggttgcggctcctgtgttccacgcggatgtgtctggcgccctcggggatcagggtcacgttccagtacccagcgaaggcacctgggtgggagggtaggagggtgttggggtgccagtgggggtgtatttgagcgatgacttgaggatttaatgagctactgcgggtaagacagctagccagggtcctgggaaccggaaaaccctccgtaaacgtttggagttacaattactattgcttcagtgtggcagggaaagggttaaaaccccatctgtcctggggaagggcgggacaatctgtcagtagccaatcaggatgaggagaaaggggggctgggccgcacactggccaatcagcacggaaatttgcttccgggccacggctcgttaaagggcccactctgacgtgtgtgcagggagggcggggcaggtagtcaccggcgtcacgaaacacgcgctgcacgaaaaggcacgagtcgttggcgcctccgcagcggccacagcggtcctcgagggcacccgagcccaacaacccatcacagccggcgctctaaagggtgaaggacaggcgcggcgtcactgacgctgggaggggcaggacctggggaaagggcagtgcctgggagcaagaggacgaggcctggagggaagatgggggtggagcctagggaggagcaggacctggcgggaggaggatgggcttggcgcccgggagtgggtgcctaaggggggctgggggcagggcctggaaggggagggggaaggcggtggagcctagggagggggtggaggctaatgggaggagggcggaggtggagcctaggatgggtggggcctgagtgggaggtgggcggggctcgggcggggcctgacgagtccttacaaggcagcggccagccacgcagaccccctgggcacccgggctgcaggcggtgccgtccaggacgcggccgaagctgtggtagaaggcgtgcccctcagccaggcagttgaggtcgcactggttgggcgctgagggcaggaggagtcggtgggccggggacccctgttcgagctccagtccccctctaccaagcttcatcaggcaaccatcactttgggcagatgaagcccagagatttggccaaagccacacatcgaggctgaggcagagccaggactggaccgtaggtgctctgcgtccagcaacctgggactcgcaggcaagtatcctggggctgcattcattcattcattcattcattcattgtctttatattaggagtccttacatattattcatttttaacaccattactcattcttcattccactgaacacctactgttttccagacactgttccaagctctaggatacagaagcaagaattcaatcagtgtgcagatggatggccttaaaaaaggccaggtgtggtgtctcatgcctgtaatcccagcacattgggaggctgaggtgggcagatctcctgaggccaggagttcaagaccagcctgggcaacatggcgagacccccccgtctctaccaaaaatacaacaataaaaatttagccaggcttggtggtgggagcctgtaatcccagctactccggaggctgaggcaggagaatcgcttgaaccagggaggtggaggctgtagtgagccaagatcatgccactgcactccagcctgggtgacagagcgagactccatctcaaaaaaaaaaaaaaaaaaaaaaaaagaagatctgagcatctggcccaggcaccagcaagtacccaatgaagtgtttgtccagtactgactggactgagtcccgcacaactgagctgtgtcgctggtcctccctgggcctcagtttccccttctgcctggaagtggggcaaaatgagctgtctgatcaaacacaaaggccgacagccctgatctccactcctccttctccagctccttctggctcccatttccctgagcctggctggtggaccctgcctggaacggatcctgggctggccctagtgggcctctgcgggggtgggatcacagcaggtttcctccaattctcagattgatggaaggaaggaagggagggagggagggagggagggaggaaggaagggaagggagaaagggaaggaagggaaggaagaaagggaaggaaggaaggaaatgaggttgatggatggcactttgtccattctaggcttttcttatatctgtgtctgccttccccatggcgtgtgaagctgcctgtctccctgaaatctggaggcgcactgacccgggcacgtagttatataactcgctattttcagctcaatgcagcaacatttcctgctactgggataagtttgagaagtgttggcctctggatacagctctaagtcaatccttagttgggtgttcagccctgtgcagaatgaaccctgcttccctctgcccctgtttcacgcctaacatatgctgtttctgtttcactaactcctacatatccttcaaagccctagcactaataccctcttctctttgcaaccctccaagaccctctccctgagactaatgagttgttcgctctggaccaattctgaccacaggagaccagactactcacccccatggaagggcacccactggtaggtcttctgggtgcccaggacagggcggccattgtacagggcacactgtaggtctcggaagggcacagcccctggggggcagtcctagggacagagataggtgagccagaggctgggacaaccccaaggggcaggtggtgggcttcaggcagtctggggtgggagagtggtctgggaggtgggcagggcttactggcaactggcagaggcggtactcatgggagtctccccagcacggttcttccccaggaagcctgaagggagacagagtgtggcgagaacccccagggaccccctcccagggctggccttccaccctccgcccccgccaaccccacccgcattccagcgggatcagggggattaaagggcacagcatgtgtgggcaggccgagggtgcggccaggggccgggctgggccggcgggggaggaggggcagggaccccctccgggccccgctcaccggaggcagcgccggctgcgcacagagacgccacgcccgcaggagctggagcagcgggtccaggacacccacggggtccactcgcccggaccctacttggggagacagaggcacggtcagccttgtagggggacgctggtgaccccacactgctgactgggtccccattcccactcgccaccccctgggctcatgcccccccttacctgagcactgacccccaaaccacagttcagcagggcccacaggaagagcaggaggttctggaagaggtggggcctggggaacagaggggccgagtccatagagccaccgccagagacacagggttgtgtcccggctctgccctgactggctgtgtgatcttggaaagtaactaaacctctctgagccctacctctcgtctctgaaaaacggggtaatagagcctcccttacaggaaagttgaggggtcctgtggatcaggtaaagaagacaggagacgtggagcccggtatggagaggaagaactca[133 bp omitted]gcctcagcatcccgagaagctaggattacaggtgcctgccaccacgccggactaatttttgccgttttagtggagacagggtttcaccatcttggccaggttggtctcaaccttctgacctgaagtgatccacctgctttggcctcccaaagtgctaggattataggcatgagccactgcacccagcctacaatattattgatatgtgtattgtgctataatgcagacagtaggtgcttaatcgatgcttgatgattggagggatcattcaaaaatagtacacaggtgcctcctagggctggggccccctccccgccctccccaccatcactgcttctacctttccgtgtggcctgaggccagccactccactctcccaggcctcagtttccccatctgtgcagtgggggccaagtggactcagtccatgattctgtgacaccctgcggaaggtgcggccggcaggggctggatcaggagttgggtccctagaagaggccctcagctgcaccccggccccagggctccctcagctcccagacagcagggagtcccccggattggggatgggacagggagggggtgacctggcccaggtccgttcggtgcctcatggcctcatcggcggagggggtgggactgagctccggggcagcccgtggagggaaggggccactgctgaggctggagcagggaaggggaggaggctgactgcctctctgggccttagtttctccatcctgtcagggcagggatgaagtcacttgccatccacaccctcctcatgaccccagcctgcagggggaaagaggggggaagggaagcagccgccaagtgagccagggcgtcctgctgccagcagagcctgaaggcaggtgggtgagccccggcccgggcaccagctggggaagaggctgggtcccacctggaccctgtttccctggctccagcatttggacttctgaggcaccaagggtctagggtcctgggtatctctaggtactgagacagctgtgtggtctgctgcatccgtgcccctctctgagcctagagcctgggctggc[148 bp omitted]atggtaaaaccccatctgtactaaaacacaaaaattagcccggtgtggtggtgcacacctgtaatcccagctacttgggaggctaaggcaggagaatcgcttgaacccaggaggcggaggttgcagtgagccgagatggggccaatgcactccagcctgggcgacatagtgagactcagtctcaaaaacaaccaaccaaccaaaaaaaacagggggagggggcttgaccttctgaccacccccaccggactctaagcctggtttgaggagtgggggtctaggtggtgaaaagtggggggctacaaggaccaccctaccccctcctcaatgggccctgcccagaatcaaggctctcccctccccgtgtgggctgcagcccggactggcggagggatctcaaggcaagccgcacctctgggcctcagtttcccccggagaaagtgggaggataggcagatggacttaccggctgcgcggagcccaggcagcgcgtcccggctccctgagcggccccagggcgagcggaagcggcggggcccaaggtgctgggcggggtggggagcctgggacggtccctcccaccgcggcctccgcaggcgcgcccaggcccgggtcaggaggggcggcggccccgggcgccctcgcgcggcgggcgcggatctgcggcaggggactgcccggcggacgcgagcgcaggggtcccggagccgcaggctggtgtcgggcgcccgggtccgggtgaccttggcaggctcgggcgggggcgcggcgcggggactgaccgccctcctctgccccggggctgctattccgggcgccgcgctcagggcccgggaatgtgcgcgaaccgaggtcaccccgccctgggtctgggagtcccgggcgctgcccctaccccgccgacgcccggattgcgtcccaccggcgtccccatccccggtcacagccccctcccctggtcctgcccctcacccctctcgcggggggtcgacctgctcgtggatggggaccctggcgcgcctgggctcccatccgggggttccccgacccaggtcccggtcacccccagcgcagggccccagcgcactggggagaggctcggccccgtgggccgcgcgcggggggcggagagaccctcccagctggcgcattcccgggcgctgctgtcaccaggggacgcgccccaccccgcctcccgccctccctgccgggccccggggctgccagcggggcttcagagccagacccgggtccaggcggtccctctccctcacagccgcggccacaccctctccggcctcagtttccccatcccagcagtgggcccggcagggatctccaccgcgaaccttccatctggaatccggctctgcgcggaccggcaacgcgagggggcaccccgggactccccccaccccaccctttcccgccgggcgtctgtgagccgccccgtgcccacccacgcagggatgagaccaggccctgggttctgggctccaccagtttctggtgtcgccccacggcgccccctggcgggcgggctgagggactggggcactaaaggagggggtggagggactgtcctgctccctgggctccacccaggctcggtctgagcaccccctcctccaggaagcccaccctgctgtcccacagcgctgaccacagggagagaggtttgctggggacatacagggtgttgctggtccaactcagtctgccctccagcctgtagcatgtcagcagagccacccatatgccatttattgagcacctactgtgtgcacagctgtgaacaacccagccagtcccaggccagcgggtaaggcagccccctggaatgtatgaccccccaccttctgacctggactattggagaaaatagcccaggcccaccactgatggccccaggttggggggtggtggttgcggggatgtcaagaaggccctcactgaaggggtcaagagagaagggcaggccgggcgcggcgcctcatgcctggaatcccagcactgtgggaggccgaggcaggcggatcacctgaggtcaggagtttgaagccagcttggacaacatggtgaaacccagtatctactaaaaatataaaacttagccaggcatggcggtgagtgcctgtaatcccagctactcggaagactgaggcacgagaatcgcttaaacccgggaggcagaggtggcagtgagccgagatcacgccactgcactccagcctgggagacaggcgagactccgtctcaaaaaaaaaaaaaaaaaaaaaaaaggaaagaaagaaagaaagaagtcagctcaggacatgtgtcaatgtgtcattaggacaattgtatcctcctcagatgtgccccattcccagatgtccagtccacagagctccactgggagtgcagacagcaggccctgtgccccgcagggaaggtatacagaaagcacagcgcccacagggagcacacacagcaggcattatgctctgcaggaagggtatacagcaggtgctgcatcttgtagaaatgcatagagtagactctgccctgcaaaggagtgtatacagtagatatggcaccttcagaggagtgcatacagcagtcactgcatcctgtagagagtatatacagcaggtgctgcatcctgcaaggaaggtatacagcaggtgctgcatcctgcaaggaaggtatacataaggcgctgtctcctgcagggagcgcatacagtaggcactgagttctatggaaagtgtaccccgcagcccctgttccctcctgggagtgcataccgcagccactgcaccctgcgtgggggctctagagctggcaagattggcagaggtggtggtgaagatgtggagggctgccccccacccccagttcttgtcccctaccgtctcccacctctgtcctctggatgtccctaggaggaggctgggagctcagcctaagacacccggtgtaggtggagggggtggctgctgaggctcagaggctcctggggtcccagttgggcggggtcccagcttactacattcccctgcccttgcctggaccctgacccaggaatcagccgagtccccctactctgaatttcagcctggaccccctccttgaggcagcgtcagggctagaggggagactgagacgcgggtcccggcggatgtggatcaattaggttccatttccttcatggttgtatggccttgaggcttaaggaatgccgcgatctgctgtgtgactgggctacagtgaacagtatggtaccccacacttcaaactgtgttcacagggtagatttcatggtaagggttcttaccataaaagaacaaaaacagtgggacacaagggacctcgggaagtgacaggtaggcctgtcatcttgagtgt[134 bp omitted]ccagcaaggtgaaaccccgtctctactaaaaatgcaaaacctaggacacggtggtcccaggatacctcaacctcctgcgtggactgggtggggcctccccatccctgccccacagacccctggaccccccggtccctggggctgtccgtctgttcctgggcaccagcaggggccacgcagagttgggaccctccccggctggagtcaccccatgggactcagggccctggaccctccttggccgctgctcgcccggtcctcattctgtgccggtttcttgtgcacgctcggaatctgttccctgcaggcacccagtgccccgggcaccgtccagaattcctggaagagacctcttgctttcttaccccactgcccaggctccaggcctgtgacatggcctccccagggtgccccttcccctccaccttcacgtgctgaaaaccacctgttctgtcactttcaggcgacgtggatcaggtggactggcccacctcctccattgtgtatgacgtaacccatgcttggccaaacagataattccatctcctagagacggggattggctgggggatgaccatgtgacccaagtgggccaatgagagcctgccctgggacttgaactgggccattagaggaaaaggtggtttcccgtggctggggtgggctccagggatggcgtgagttgaggtaggctggactttcttgactgctcgaagagatgcactgtctcaagcagatgctgacagacggcagcaaatggaaggggccagatttcttttttttctttttatctttctgtccttttctttctttttttacttttttttgagacagggtcttgctctgtcgctcaggctggggtgcagtggtgcaatcacagctcactgcagccttgacctcctgggctcaagcgatcctcccacctcagcctcccatgtagctgggactacagatgcatgccatcacatctggctaatttttttgatctttagtagtgacaggatcttgctatgttgtcccgacccaggctggtctcaaactcctgggctcaagagatgctcctacctcagccttccaagtagctgggactacagacatgcatcaccatgcctggctaatttttatattttttgtagagttgggggtctccccctgttgcccaggctggtctcgaactcctgaactcaagtgattctcttgcctcagcctcccacactgctgagattgcaggcatgtgccacccaccgtgcccagcccaaaagtctagatttctgagaaggttgtttgagttcctggattgagcctcatctgaaggcattcatccattttttttcactttagcaatttttagtttcttactttttttttttttttttgccagggtctcgctctgtcatccaggctgtactgcagtggtgcgatcttggctaactgcaacctctgcttcccaggctcaggcaatcctctgggatcagcctcccaagtagctcggactacaggtgagtgccattatacccagctaatttttgtatttttagtagaggtggagttttgccacgttgcccaggctggtctcaaactcctgagttcaagtgatcctcccaccttggcctcccaaaatgctgggattacaggtatgagccactgttcccaaccttattttagaatttttaaaaaatttttattattatagagacaaggtttcaggaacgaaactccgtctcaaaaaaaaaaaaggtgataacaattactatttcatgattattgactaaattccaaatgttattttatttggatttggatttcaccaggcttgtttttttgttttttttttttttttcagatggagtcttgctctgtctcccaggctagagtgcagtggcgtgatctcggctcactgcaagctctgcctcctgggttcacgccattctcctgactcagcctcccaagtagctgggattacaggtgtgtgccaccacgcctggctaaatttttgtattttcagtagagacagggttt[133 bp omitted]ttctgttcctggattccataagacattgaactatttgtctcataattagtaaaaagacccatgcagattaaaaatggattatttctgtggtaatcgggtgggttctgatgcccatgcagcaccttgaacacggctggagttgatgagtatccctgatgggaagtcgatgctgcgtccatggagagaaggggcacggggttgagtgtccacccagcacctaatggagatacagaccctctccctgccactggcgctccctgtcaggtgggacagacaccagcaagctagcaaggaaaccatcattctgggttgtggtggaactggggagaagcaggcatggatcacgtctagggcatcttggggcaggggcggcctcctgggcacaggtggccctttcctgcctgggcctaaaagctaagaagaggatgccaggcaaagtctgggagggtggcagagggaacagcacatgcaaaggccctgtggcagggtgagcttggtgtgcgtctgaggacaaatgggaaggccagaaggttgatgtcttggccttgtgtcctcatcttgggtggtcaactctggggaatgttgtattcagttcctcagagggtgcctgatgagtgtgggactcagggtgccccgggggtacccagctcccaccctgctccctgaaccaactctctgcactaaagccttgcttcaggctctgcctttgggggaacccacacagatgggccaggagggttgagtaacctgccccagctgccagtgctaaagccacccacctggacaatgtcagtggaggaagtgaagagagtgggtgagaggccccaacactgaaccccaggctcccaggagaaggaggaggtggcttaaaggagaactggaaaaatgcatccagaaagatgggaaggggccaggcgcggtggctcacacctgtaatcccagcactttgggaggctgaggtgggtggattacctgaggttgagaggtcgagaccagcctgaccaacatggagaaatccggtctctactaaaaacacaaaattagctggatgtggtggtgcatgactgtaatcccagctactcagaaggctgaggcaggaaaatcatttgaacccgggaagcacaggttgtgctgagccgagattgcgccattgcactccagcctgggcaacaagagcaaaactccatctgaaaaaaaaaaaaaaaaaagatgggaaaacatcaggagcaggggtgtcccagaggacaagagaggacggtgcttttattattattatttttttttttaattttttttttgagagagagtctcgctctgtctcccaggctggagtgcagtggcacaatctcggctcactgcaagctccgcctcccgggttcacgccattctcctgcctcagcctcccgagtagctgggactacagccgcccgccaccacacccggctaattttttgtgtttttagtagagacggggtttcacagtgttagccaggatggtctcgatctccttacctcgtgctccacccgccgtggcctcccaaagtgctgggattacaaacctgagccaccacgcccggccacttttattattaattattattattattgtttttgagacagggtcctgctctgtcacccaggctggagtgcagtggtgccatcacagctcactgcagcctcaacctcctgggctcaagcaatcctcccacctcagcctcccaagtagctgagaccacaggcgtgcaccactccacccggctaactgtttattttttgtagagaaggggatctcgctgtgttgcccaggctagtctcaaactcctggactcaagggatcctcctgcctcagcctttcgagtagagtagctgggattacaggcatgagccctgcatctggacaacagtgcttttaggaggaaacagagttgagagagggaagaacagggcttggtttcggggcaccaagtctggacgccccctcctgcgctcacactgggccatgtcgtgcagcataaaccacaatcagtgggggtctctggagccctgtggtggtggtacgtctcctgcctgctctgctcccagggccatgggtccctgggcacctgcgtggtcaggcgtccaggcacgtgagacccacgggtgcttggtaaaggccaggagaccaggcagggaccagggagctgggctgagtcacattggttggtggcctccaccctggcgcctgccggaaggagggtgctggggaggcctgggccgccgctgacctcggaggcagccccatgagcctcctgggcctccagggagtcgggtgcctgctgtctcagctgccacgcctccacctgcagtaggtattttgagcaaagcttcccggcacttctccgcaaaatccgctgagtctgtggttttctcaggtcagcaaaagaacagagactggagaggaaatcgagcctgtggtctgggatgtgagaggtgctgggggtacaggggctgcagtgctagaccacccaggcctcaagaacccagggcagggggtaggatgggagggccaggtggccccattgaaccctgccctgcccctttgcaaaacggcatcctgtgctcatcacacaagccgtgcctcagtttccccatctgtaaactggggcattagtaggactatg[282 bp omitted]gcctcccaaagtgctgagattacaggtgtgagccaccacgcccgattaatttttgtatttttagtagagacagggcttcgccatgttggccaggctggtctcgaacttctgacctcaagtgatcctcttgccttgacctcccaaagtgctaggactacaggtgtgagccacagggctcggccaattctttttttttttttttttttttaacctttgaggtgaaattcacataacataaaatttaccctttttaaaatgcacaattcagcagcatttactgccctcacagtgttgaacaagcaccccctctatctaattctaaaacagttcatcctcaaaaggagacttgtacccaacagcagtccctccccatcccctaatctgtgtaagaggccttcagggagagctgaggggtgtctttgggggcattcatccttagccccccaaaactcccctggggcaaggctgtggtgagcagccagcctggggcagggcgggggatggggacagctggttaggagggctcacataggctgggggacagagtccctgctcagaggggcacaggctgggactaggaggcctttcccagctccatagtggagtctcagccaggaaaagccgcgggcggccaggggagagggagggcgagccggtctctgtgcaaggagcatcagctgacaggcgggctgcgaggctctgggccaggaactctgatttctttccccctaggaagctcagacacccgcctcagcacgagggccttgcctggcactgctccctgggactgctggggctggcagcctgaaagagggacagacctattgtggggggaccaggagctctggattcactcccacctagactccaggctcagccacatgcagtccgcggtgatcctgggctggcaccggacgttcggagcctcagtttcctcatctgtaacacagggctaagaacagcacctgcctcagggacaagttactgcccagaacgggcctggctcacttccttccacctccaaagctttccttgacccctgacttggtgaagtcttggacgttcttgcagtccgttaagcagtggtccttttacgaggacagggctgggtctgccttgggctcgcacagcctgacacaggcccatatgcagtaagtgcttaacaaatgcctgaactgatgccaggatggactggtgctatcaggaaggaaccggaagccaggcctggtggctcacgcctgtcatcccagcattttgggaggccgaggcaggcgggtcatttgaggtcaggagtttgagaccagcctgaccaacatggtgaaacccgtctctactaaaaatacaaataaataaatacatcagctgggtgtggtggtgcatacctgtagtcccagctacttgggaggctgaggcaggagaattgcttgaactcgggagatggaggttgcagtgagccaagatcacaccacggcactccagcccgggtgacagagcaagactctctttcaaaaaaacaaacaaacaaaaaaaaaagcaaggaactggctttctgcccctggaggattccagggtgacagtcgtgtgacagctcagacactcgggccccgagcagcccaccttgcagccacctcacctgattctcatcagcaggggacttgggctccccagctgcaacccggtggccccaggctggccaggaatcttccgccctggccctgggaccagaaaccccgcaaaggtgcccgagctcagccccgtccaatgcacgggggccccattcgtgacaccaggtggacacgtgacggctcagaaggtgtttcctgtccctagtggtgtggccgggccagattccgaaatctggtccctggaaaattccagccccacggagcctggtaacccctccccattcctggtgttatgtaacatttggggattaataccgcaggcgtccaggggcggctgccgggattcaaacccagcgctgccctttcctgggctgactgagcgactttgcgtccctgggtctcaatgtcttgcctgtacaatggggacaaggcccgtttttgtgtcccaggctgggtggaagggtgagggaagacctcaccaggaaaggggtgcacctgagtctggggcagggcttggagcaaccacccccacgattccgggggagtctcaagccccccactgtcttcccacccagctgttctctgagttctctgaggtttctgatgctctctgaggtcgccatttcaaggacgtccccacctggctgtccgtgcaaaccccagccagggtccacctgctgctccacacagcccatcccttctccgggctgaagctccctcatatgggacatccactacactgtaggaccccagcccatgcgtccccaagccccggtcctgcctcctgggtccctgtcccaggcctcaccgccctccccaccagccccagcatcacaaacgctgggcttctctgccgctccgaattctgctgtggctccccagtgcccagggccatcaagccccaggttttcatgtgggccccagggacccgccagcagggaggacccgaaatggcacacattcagaacgtcgaggctcatacctcaagcgcactgtgggggagaagcccccggaagcccccaaccccccacgcgcgagagagcctcagtttcccgctcggtaaagcgggcgtatcagcggttcccagccagcccgggtgtgcagggtcggaggagctcgcgggctgagcgcggcccctggcgcccggttggcgtgcgggactcgggcgcgctctggtccgtggaacttccccagccgcggcgtccccgccgctcacgcgccccccactccacggccgggcacctcccgcccctccccgggctggacctgcgcccgggctccgccccctccccgcccccgcggccaataaaacgctccccggcggctcctgcgccctcagagcggccccggagcggccgcagcgcggtggtctcggcccggctgcgccagagtccgcgcgatggagccccggccgcggcggcggcgcaggagtcgccccctggtcgccgccttcctgcgagacccgggctcgggccgcgtgtacaggcgcgggaagctgatcggcaaggtgggaggcccgcgccccgagtccgcgacggggccggaccgggctgggctggggtcccggggcgcgcgggcgatcctgcgcggtctacgcggcgcgtccctgcgagcgcggggtctggagcgggcgcgcgtccggagccgcggggcctcccgtgcggggtttcgcatggcgggaaccgtgttgagcgcgctgtgcgtcgtgtccgtgggttgcgtgtccggggtgtgggcgtgcggctcggcctcgggatgcgacgctgtgttgcccctgggtgtgtgtgcgagcctggcgagggtctgagtgtgccgcgtctgtgcccgctgcttccaagtgtctgggtgctgtgcggtgttcgtgtgtgtgtgtgtgtgtgtgtgtgtgtgtgtctgggtgttgtgttgcttgttcacctgttgtttgtgcgtcatgcctttgtgtgtccagtcattgtgttgtgtgtctgggtgttgtgtgttcatgtggtgtgcttgtgtgtttgtgtgttcatatgtggtgtgtctaggagttgtgtgttcatgtgtttgtatctgtgtctttgtccatgtgttgtactgtgtgtccaggtgttgtgtgttcatgtgtttgtgtgttcctgtgctgtgtctgggtattgtgttgtgtgtccacacgtggtgactgtgtgtccagacattgtatattcatgtgtttgtgtgttgctgcgttgtgtatctgggtgttgtgttgtgtgtccatgcatggtgactctgtgtctgggcgttgcgtgtttgtgtgtcgtattcaggcgtggtgttgtgcatccggtgctgtcttctggtccgtggcctctatgcaccaggcgtggatgtgtctgtgtctgtgtctctgtgccttcttgtgtgcatcatgtcttgtgtgtccaggcgggagggtgggagctgtgtgttgttttttccccggtgtgtgtgtggagagacctggacgcgcctgcgtccctggctgccctgtgcctctgtacgcgctgccagcttgcacacccgtgcacacctgcccactgatctgctgacccctccccacagggcgccttcagccgctgctacaagctgacagacatgtccaccagcgccgtgttcgccctcaaggtggtgccgtgtggcggggctggggccgggtggcttcgcccgcagggaaaggtgcgtgtccccatcggtccccagggcccacagtccgcagcccgcagcgtgtcccgaagaaggccctgccctttggtcccagccctgggtggccatgagatcgtacaggaggcaggcgagcatcctgcagcctgtgccccgctgcaggcgggtacatgtcggggccgtgcctgcaggtggagcgtgagattgccctgcatagccgcctgcgaccccgcaacatcgtggctttccacggacactttgctgaccgcgaccacgtgtacatggtgctggagtactgcagccgccaggtgcccaggggcggggagagggcaggattcatgtcagctgtgcccgtctctgtccaccccgtgtccatctgcacctcgccgctgccccccgtaccatcctgtgtgccctctgctgtccattcgccagcgcttcttacgcctacgtagggccaattgtgtccatcctttactcacctgggcacacccaggctctcttgatccacctgggcccagcttacgctgtgctcatcaggcccgtctcagactcacctgtgaccgcctgggcccatcagaatgtgtttgcttcttcttggcccccttggactcacccatgcccacctgtacccaccagcatgcccctgtgcctacctgtggtcacctgcgcccctcctgcaccctgctgtgcccaccgtggccgtgaactcactgtgcccattaagtagacctgagcccacctgggtccacctgtgccagaatatgccccctctgcgttcactcctaatcacctggcccttctcaagctgacaagcatgtccaccagcgccgtgttcaccctcaaggtggtgccaggtgcggggccggggccgggcagctgtgcccgtggggaaaggttcgtgccccccctcagtggccacctgggcccatctgaacccgcatgctcctattggggtgggtcatctttgctcacctgtgtgcacctgcgctcacctgtgctcatcccataatcagccataccaccttggccaggctgagcttacatttgccttctaatccggggccgctggtcacccacagtctttggcccacgtgctgagggcgcggcagatcctgacggagccagaagtgcgcgactacctgcggggcctggtcagcggcctgcgctacctgcaccagcggtgcatcctgcaccgcgacctgaagctcagtgagtgccaggaaggggaactgtgggcgggggcgtcgggaggtgggcacggatccacccccatgcgcaatgcccctcccactgccaggtaacttcttccttaacaagaacatggaggtgaagattggagacctgggactggcggccaaggtggggccagggggccgctgccacaggtgagagccggggggagggctctgagcagtccgtccgggtgggcacggctggccctgaagtctggcacggggatcccagccttcctgagccccccatgacgcccttcctagagtactctgtgggacccctaacttcctggaccctgaggttgtctccagaaacggtcactcctgccagtaggacatctgggctctgggctgcatcatgtgagtggggtcctggagaaggtgggcagggcctccggggggggcaggtgtggcggggggggagcctgcacggaacaggtggggaccgttgtgcagggtggggcgcgtggaacaggcacctgtcgccaagtgtgcagtatgaacaggacgtgtgtggggaggcgtgtgtgagggaggacgggggagggtgtgcacagagaggtggacaggtgtgggcaggtggcagtggcacaggcaggtcagggcgtatgtgtacagggatacagcgtgtgtgggcgcagggcaggtgtgagcaggcatgggatagcattggaaggtggaggccaggcgcagtgactcacgcctgtaatcctagagctttgggaggccgaggcaggaggatcgcttgagcccaggagttcaagaccagcctggccaagttggtgaaaccctgtctctacaaaaattacaaaaattagccaggagtggtggtgtgcacctgtagtcccagctattcaggaggctgagttgggaggattgcttgagctcaggaggtggagactgcagtgagctgtgattgcacaacggcactccagcctgggtgacagaatgagaccctgtctttaaaaaaaaaaaatagaagcattgaaaaggtgtatgcaggtgagttcagggtgagccaggtgcaggcaggggatggacagacgctggtgtccaccaagcagggtccatgggactgcacagggtgccaggtgcaggcaggggatggacagacgctggtgtccaccaagcagcgtgcatgggactgcacagggtgctaggtgcaggcggatgttgggagatgaggaagccgatatgggttgcacagctaagctgtgtaggcaggtctggccaagtgtgcaggggtagctctgagcgatgcctggacacccaggttcttgccccccacctggcccaggtacacggtgctgactggcaccccacccttcatggcctcacccctgtcggagatgtaccaaaacatccgtgagggccactaccccgaacccgctcacctgtctgccaatgcgcgccgcctcatcgtgcacctcctagcacccaacccggccgagcggcccagcctggaccacctgctgcaggacgacttcttcacacaggtgggcggcggtcctcggcgtggggtccctggcgtggggtccctggcaggtgatgagccagagcctgccctgctcagccgagggaggccccgccctgtcccaggtaacccaggtgctcaggggctgggtgacctaagccggggataaccccaaatccccatccaaagggtttcactccagaccggctgccggcccactcctgccacagtccccccatcttcgccatacccccgcctctgggcaggatcttccggaaggtgggccagcggctgctcacccagtgccggccaccctgtaagtaccacccccgcccacacctgcccaacacctgcccacgcctcccacctgcccacacctcccacctgcccacgcctcccacctgcccacacctcccacctgcccacgcctcccacctgcccacgcctcccacctgcccacgcctcccacctgcccacgcctcccacctgcccacgccccccacctgcccacgccccccacctgcccacacctcccacctgcccacacctcccacctgcccacacctcccacctgctcacacctcccacctgcccacacctgcctacgcctgctacctgcccccacctgcccacacctcccgcctgcccacacctcccacctgcccacaactgccacctgctccgctctgtctccacatcaggggtgggtgtgggtggcaggtgcccccctacccccagcttggggcccaggctgtgccccctccaaggccttgtgcctccctcaggccccttcacgcctaaagaggcctcgggtccaggagaaggtgggccagaccctgactccatggagtgggacggcgaggtgagacatcggggtgggggacacggggagacacaggtggagggcatgctggcccctgctaaaaccccctcccccatgccggcttctctgaaccccttctggggtctccaagcccggccccctccccctagtcccgtcctgacgcatcagagctgggatccatttgtgtccaaatgtgcccacctgggctttcccaagggccgggctcgaggccatgggaagggtcccatccatggcttcagtccatcacatttattgagcacctactgtatgcctccgagacactccgaggctgcctcccaaggggaaagcagtgcctctgtgtgcagagcacggagggcacaggcaggggccagagcctgccacccacctcacgcctgtccctggggctggggccggggccacccccacccctgctgctcccacctcagagctccctgtctgcgaaagaggttccctgcctggaaggccccatccacctggtcgcacaagggaccctgcagagtgacctggccggtgagcagatccccgtcccagcccggggctgcaggtggggagggaggaattacaagtgacagggggaccaaggccgtggcttaccagggtcacagccgccgtcccggcctcacctttcccgcctgtcaaatgggaatgccgcctctgggttgaggatgagatgttcctggatggagccgtggggagggggactggttggaagagcctggtggtgggaacccagacctgtctgcggcacaaagacctgtcttcccagggcccgaggggagccggcggccagaggtggaggcggccctcagacacctgcagctgtgcctggatgtaggccccccgggtaggagccggcccagcccccaggatcacctttactcttactagccaagtaaaattgccttcattcccatcctgggccctcctgggtatttctgggggtgaggagtaggggtgagggaggccccaggacacggtgacatcaggagagtgggttagccctcctgtgtgcagagcctggcacggagggctctgcggcagccttacgtttcacggtctcttaaattcatgacccgggctcgttagagacccagtgagtgaggaaacgtgacctgggacgttggacacagagccctgtgcccacaggccacactccaaagggggacccctcttatccccagtgtcccagaacccaaaccctcttcctctcccctcctctccctgagcctccactgacccacacatactgccacccttagagagggagccccaaaccccacgccaggtctccagcccagaagccttttcttttccttttctttctttttttttaagagacggaatctcactctgttgcctaggctggagtgcaatggtgccatcttggctcatcacaacctccacctcctgggttcaaagcgattctcctgccttagcctcccgagtagctgagattacaggcgtgtgccaccacacctgctaatttctgtattcttttagtagagacagggtttcaccatgttggccaggctggtctcgaactcctgacctccggtgatctggccgcctcagcctcccaaagtgctgggattacagacgtcgtcagccaccacgcctgggcgcatttttttttttttttttttttttttttttttttg[272 bp omitted]cccagcctcaggaccccatctctacaaaaaaatgagccgggcatggtggtgcatgcatgttgtcccagatactcaggaggctgaggaaggaggatcacttgagctcggaggtggaggctgcagtgagctgagatcgtgccactgcacttcagcctgggcaacagagcgagaccctgtctgaaaagccaacagacaaacaagcaaaaacccagaaacggggcagggcgtggtggctcatgcctgtcatcccagcactttgggaggctgaagcaggtggatcacaaggtcaggagatcgaaaccatcctggccaacatggtgaaaccccatctctactaataacacaaaaattagctgggtgtggtggcacgtgcctgtgatcccagctactcaggaggctgagggaggagaatcgcttgaacccaggaggcggaggttgcagtgagccgagattgcgccactgcactccagcctggggacagagcaagactctgtctcaaaaaaacaaaacaaaacaaaacaaacaaaaacacacacacccagaaatgtgtagtattttcagagcattgcaagtatttgagaattgctcattcccaggggtgcgccagtatcccacagtctccctctgcaagccagaaattagttacggttccgtggcttctgttgatgtctggtctcctagaatccaccaccgaagcccccaagcctctgtccggtccccgccgtgggaagggtctcacccatggtttcagtccatcacatttattgagtgcctactatatgcctgacccctgacccctggctcagcatacctttgtttgtgcccagccacacaggaccccctgggagagcagcagcccatcctctgggcccccaaatgggtggattattccagcaaatacggctttggctaccagctcttggacggggggcgcacgggacggcacccacatggccctgcgaccccccggagggtaagttgtggcctcctgtgccctgggggaccaggcactccccctgccttttttcattcatctctcaagtatttattaagcacctactgtgcacacctacaggtgctccctgcctggtcggggagaacaacactaaacgaatcagcaagtgcgtttctgtagtaaatgaacccagtgaagaggcagattaggaggggaggtgaatctcagtagtgtgggtagggggaaggggaaggggtctctgagaaagtgacgtgaatgacaagcggcagccctgtgctttgggaggccaaggcaggattccttgagcccaggagatcgagatcagcctggacaacatagcaagaccccatccctacaaaaattttaataattagcttggtgtggtggcacacacctataatcctggcacgttggaggctgaggtgcggactcgcttgaacccagcagtttgagatcagccttggcctcatagcaagaccccatctccacaaaaaaattaaaaattagctgggcgtggtggtgcacaccggtaatcctggcactgtgggaggctgaggtgggagaatcacttgagcccagcagtttgagatcagcctgggccacacagcaagacctttctctacaaaattttcttctttttttttttttttttttgagatggagtctcactctgtcacccaggctggagtgcagtggcgcaatctcggctcactgcaagctccacctcccgggttcacaccattctcctgcctcagcctcctaagtagctgggattacaggtgcccgccaccactcctggctaattttgtatttttattagagacggggtttctccatgttggccaggcgggtctcgaactcctgacctcaggtgatccacccgcctcagcctcccaa[224 bp omitted]tcagtaggtcccagctacttggatggctgaggtgggaggatcacttggtcccaggaggtcaaggctccagtgagccatgattgcaccactgcgctccagcctgggtgacagaacgagactctgtctcttttttttgagacggagttgtgctcttgttgcccaggctggagtgcaatctcggctcagcgcaacctccccatcccgggatcggggtagctgggattacaggcacccgccaccacgcctggctaattttgaattttagtagagacggggtttctccatgttggccaggctggtctcgaactcccgacctcaggtgatcctcccacctggacctcccaaagtgctgggattataggtgtgagccaccgcgcccggccttaacacaatctttctagcgggagtgacatgggggccagtggggaggtggctggactcatcaggtgggcagtggcggaggcctgggctgtgctggtgaccggggagggatgagaggggctgcagtgtggatagagttggaaggcaggaagggtggaccagctgtcagctgaggtgaagagaggacagagagccgcactgggcatatggataaggtgtaactagggcagagctgctctttaaagccaccattccagggggtgtaggtcaatggaagggtgtccactggcctgggctgtccaggacagaggccctgtgtcctggccccagccaagtgtgctacatgcccaactgcgggaggctggaagccttcgccctgagggatgtgcccggcctgctgggcgccaagctggccgtgctgcagctctttgccggctgcctgcggcggcggctgcgggaggtgagagctggggtgctgggtgtgggggcgaggggtggggacgccccctgcgtcacgtgacctcagccgagtctgtccacaggaggggaccctccccacacctgtgccacctgctggacccggcctctgcctcctgcgcttcctggcctctgagcacgccctgctgctgctgttcagcaatgggatggtgcaggtgagcccggggctcaaactcggggcactggggctcggcagggtggggtctggcctgcctgggctgttacggagcaagctttgggggagccttaggaagcatttgcctcccaggaaaaaaaaaaaaaaaaaaggtattggctcctgcgtacaaaaccacagcatggaaaatgcatgacgtttttgggccaggcactgtggtccacacctctaatcccagtgctttgggaggccgaggcgggcagatcgcaaggtgaagagtttgagaccaacctgaccaacacggtgaaaccccatctctactaaaaatacaaaaattagctgggcgtggtggagccttcctgtaatcccagctactcaggaggctgaggcaggagaatcgcttgaacctggcaggcggaggttgcagtgagccgagatcacgccacagcactccagcctg[225 bp omitted]tggggaggctgaggcaggagaatggcgtgaacccgggaggcggagcttgcagtgagccgagatcgcgccactgcactccagcctgggtgacagagcaggactctgtttaaaaaaaaaaaaaagtcagggtcttgctggaagactgtgggcaggggagcccccatctgagcctcagtttccccaggtgtacagtggagcacttggcctcccgaccccgagttcctgtggctggggcaggcactaggggccagactgggggctctgggtccagtgtccacttgtccttctggagcgccacggctggaggcaggtgcaggggtacccgtctccccttgactggtatcttaccctttgcaggtgagcttcagtggagtcccggcccaactggtgctgagtggcgagggtgagggtttgcagctcaccctctgggagcaggggtcccctggcacctcctactccctggacgtcccgcggagccacggctgcgcccccaccaccggacagcaccttcaccacgccctccgcatgctgcagagtatctagtgcccctgagggtcagagtggacccctgcatggtagtgccagggacccaggctccatttccattcctgtggctcccccagaggggctgtcctgggggagggctggggggcacacgggaggtgggttcttgccttgtggcatgactgttcaacccagactttgctgggatctcttcctttttcattaaagacaatttgaaatgctgtaggccatggtctgcctctctttgggggaaagcgtttgaggagctttggcaaagaaacgttgaccccacgtgacgttgcatcctccctgtttctcttagtggcagaggtgggttacattttcactaatgcagacattagcaccagaggccagtgtagtggctcatgcctggaatcccagcactttgggaggccaaggcaggaggatcgcttgggcccaggagtttgagaccagcctgggcaacatggcaagaccccatctctacaaaaaattagctgggcatggtggcacgtgcctgtagtcccagctacttgggaggctgagatgggaggatggcgtgagcatgggaggttgaggctgcagtgagctgtgattgcaccactgcactccagcctgggcgacagaacaaagaccctgtctcaacaacaacaaaagtagtaccagaagtggggttctgccataactccaaatctaaaacatgggacagttgcttaatgggtggacaggaaagaagccgacactgaggctggaaagatggctggctatgctccgggacacagttggcacaaccgtcacctgtgctgccctggggtggacggtgcactcatggacctgacctctctgggctgatggagcattggttgttagatcaaaatgtcataaaaggccaggcgtggtggctcacacctgtaatcccagcacttcgggaggccaaggcaggcagatcacttgagctcaggagttcgagaccagcctggccaatatggtgaaactccgtctctactaaaaatacaaaaattagctgggtgtggtggtagggggcctgtagtcccagttactcaggaggctgaggcaggagaatcacttgaacccaggaggcagaggttgcagtgagccgagattgcaccattgcactccagcctgggcaacagagcgaaaatccctctcaaaaaaaaaaaaaaaaaaaaaaactggacgcaacctaagtgtccagcggtgcgagactcaaacatctggccatcccctgggatgagtgaggctgggaaagtgggaaggctcacgggaggcattaaggcaggccgaggggtgcagagctgatgacggaaaaacccgtcaatcgcagaaggactccaggcccctcagtagctcttttgttttttttgagacagagtcttgctctgtcgcccaggctggagtgcagtggtgcgatctcagctcactgcaacctccgcctcacgggttcaatagattcctctgcctcagcctcctgagtagctgggattacaggcatgtgccaccacgtccggctaatttttgtatttttaatagagacagggtttcatttgtttgtttgtttgagacggagtctcactctgtcgcccaggctggagtgcagtggcacgatctcgactcactgcaacctccgcctcccgggttcacgccattctcccgcctcagcctcccgagtagctgggactacaggcgcccgccaccaag[186 bp omitted]ctcctgacctcaggtgatcctcccacctcagcttcccaaagggctgggattacaggcatgagccactgtgcctggccccctcattagcacttgaggccacaattctcagtgcgaggctcctgggctgtgctttgggcgtctgctaaggtgctcagaggtgtatcctatgctggagaaaactccacctcgaccgatgcgggatcaggagaccggggctccagtcccagctggccacttccaggcacatccaggcctcagtttccctgcctgtttaaggggggcatgtattctctggaatccctgccagcagcatgattctgcatgaagttctacttccaagttccggttatcaaccccagaaactcatcataaaagagggagaagtggctcatgcctgtaattccagcaggctgggaaattgaggcaggcggatcacttgaggacaggagtctgagacctgcttgggcaacataggaagactctgtctctactaaaaatttaaaagccaggcctggtggcacatgcccgtggtcccagctactcaggaggcccaggtgggaggattgcttgagcccaggagttcggaggtacagtgagctatgattgcaccacggtactccaccactactctgggtgatagagcaagaccctttctcaaaaaataaaaataaaaaattggctgggtgccgtggctcacgcctgtaatgccaccaatagacagatcacctgaggtcaggagttcgagaccagcctggccaacatggtgaaaccctgtctctactaaaaatacaaaaattagctgggcgtggtggtgagtggctgtaatcccagctacttgggaggctgaggcaagagaatcgcttgaacccaggagagagagtttgcagaaggcgccactgcactccagcctgggcgacaagagtgagacttcgtctaaaaaagaagaaaaaagagagacattcctggaggtgcgcacaaaagggcatcattgacatctggagtgcagtggcatgatctcggctcactgcaagctccgcctcctgggttcacgccattcttctgcctcagcctcccgaatagctgggactacaggcgcacgccaccgtgcccggctaattttttgtattcttaatagagacggggtttc[138 bp omitted]tgtggctcatgcctgtaatgccagcactttgggaggccagcgtgggcggatcacgaggtcaggcgttcaagaccatcctggccaacatggtgaaaccccggctctactaaaaatacaaaaattagccaggcgtggtggtgtatgcctgtaatcccagctactcgggaggctgaggcaggagaatcacttgaaccggggagtcagaggttgcagtgagccaagattacaccactgcactctagcctggcgacagagagacactccgtctcaaacaaaaaaaaaaaaaaaaagaaagaatagtagttgttctcaatggtgggggggggggtgattctgtccccaggggacactgggctatgtctcgggacatctgtggtcataatgacagggagtgctcctggcatggagtgggtgaagggcagggacgccgctcagcaccctgcaatgcccaggacagccccaccccagagaatggcttggccccaacatccatagtgcccaagaggagagaccctagcttggacataggaactgaaatatttacaggcttagtgtttaattcctaaagcggatttcctctgtaatcagggaaaaaaaaaaaaaaaaaaaaaggaatgaagtggagaaacggcactcccgggagacgttgcacattcccaagcccacgctgcacctcacacgcagcggggagcaatgtccccgtagtggcccctcgtcaaggtcagtgatgcacggggcgagagaggggttgaggtggggatggcctcctgccaagcacaacgtgtcctggggccacccatctgcaggcagagcgctccaccactcaaatgggggcgtgatgagtccgaggccacccaggtctgaagcttcccaggggccctcctcacagccctttccctttggaaccatagtctatcaattctgaaagtaaaatgcagacttttcttttttttcttttcttttttttttttttgagacagggtctcactctgtagcccaggctggagtgcagcgatgccatcttgactcactgccccctgtgcctcccgggttcaagcgattctcctgactcagcctcccaagtagctgggattacaggcatgcgccaccacacccggctaacttttgtatttttagtagagatgaggtttcac[215 bp omitted]gctctgcctccggggttcaagcaactctcctgcctcagcctcctgaatagctgggactacaggcatgtgccaccatgcccagataatttttgcattttcagtagagacgggatttcaccatgttggccaggctggccttgaactcctgacctcgggcaatctgcccacctcaggctcccaaagtgctgggataacaggcatgagccaccgcgcctggcccatttcttttatttttatttatttatttttttttttgagatggagtctcactctctcgcccaggccggagtgcagtggccggatctcagctcactgcagcctccgcctcctgggttcaagcaattctcctgcctcggcctcctgagtagctgggactacaggcgtgtgccaccacacttggctaatttttgtatttttagtagagacggggttttaccatgttgcccaggctggtcttgaactcctgacctgaggcaatccacccgcctaggcctcccaaaatgctgggattacaggcgggagccactgcgcttggtctggatgccgtttctttgtcacaaaattgcaaccttaacaaatcaaactcaagtcccagggtccaccaccacctgtccctgggccccctctgtttctgggaagtgacagggtctcctctttttttcccatctgtttcctatgcttactttcctggagagaataactgacccatggcggcatccccgcgtcgcctctcggccgtgtgcctgtgtgtgttgctgcgtctgtggagatagagccaactctgtgctttttatggaacgggggatgaagcaaagccagcgtttgtggatgggagagaaaatacgaccaaaacagacactggggcccatgttgggagtagagagggctgcaggcacgctgggctggggtggggggaggaagcagggggacgggtcaggggaggtcgtgtgccttggtgtggccagacctaggaggagggatcagtggggagaatttggagatgcccccagggaccccaaaggaatggagtgtgggtgagagaggaacaaaagcaagcagagaaaacacagagcaagtgcatcactgcctttaaaaacaaaatgagccggccgggcgtggtggctcacgcctgcattcccagcactttgggaggctg[134 bp omitted]gaggcaggagaatggcgtgaacccgggaggtggagcttgcagtgattgagtgattggagatcacgccattgcactccagcctgggcgacagagcgagtctccatctcaaaaaaaaaaaaaaaaaaagtttgttgttattgcaagacaccaagttgttgttgttgttcttcttcttcttctccttcttctctttcttcttcttcttttttttttttttgagacagtttctctctgtcgcccaggctggagtacagtggtgcaatctcagctgactgcaacctctgcctcccgggtgcaagcgattctcc[134 bp omitted]ctgcccctcaaagcgctgggattacaggtgtgagccaccgcgctcggcctcttctctttttttatagagagaaggagtgtcgctccgtcacctaggctggactcaaactcctggtctcaagcaactcccccgtctcagcctcccaaagcactgggattactgtgagccaccgtacctggcccagacaccaaatgtgaaggtaacttgtgacccggcaatagctaactaatacacaacccaaaacatgcaagaaacagcttcatttctgcccggaacatttgtttccagggagaaaaagacaaaacatcttcagagtgtttaactgggtgtcttgcaaaatgacctacctagagtatttatttccatctgcttgtgggcgtcaagaacagcaacaatctgtgccgtctcccacgccccgagcccacaatggtggtttattaaaaataaaccaaccacagaatatattaattttctaacctcccgggccaattcttatttctaggtataagaacttccagagatggcaaagcacccacaccgccctcgtgctaaagtttctggaatcttccttagacgggtgaactgtgtgctgccagaaataaaattaatagcctcacttttttgggtgcttacaagggttggaacttcaagaaatggtcatgaattcactccagccctggctcaaagatttttttttctttcttcccttcttcttccttcttctccctactcccttctcttcctctttctcctcctccttccttctccttctttttctttttggaaaccactgatttaaccctgagagagggaaaacttgtcctggcaagaatttccaaagctcagttttattttttaagacaaagtctcgctcttgtcactcaggctggagtgcagtggcgtgctctcggctcactgcagcttccgactccctggttcaggagatttttctcgtgcctcaggatcccaagtagctggtactacaggcgtcatcatgcccggataaattttctacttttagtagaga[132 bp omitted]ttttcccacgctgaggctacagctgaacccagcctccagaccacctcctcattggtctatgggagcacgtgacatcatgcgtcctccaatcaccagcaagcaagcaaggcgtgggcgggaccaagggcggctacctctggggccagcaggattggctgttgcccgtggtaactgtgtgtgacgtcataaagcttccttgcaccttggcaaggccccgggagcagggaccttttctctcccactatacagatggggacactgaggcgctggttctcaatctatgaaaaaatggggtgctggtaggtaggtcaacctgggtcccacggggagttttcaaactcctgatgactccagagaattacgctgagtgaaaaaagcctgtcccggccgggcgcggtggcccacgcctgtaatccccgcacttaaggaggtcgaggcagccgggtcacaaggtcaagagatcgagaccagcctggccaacatggtgaaaccccatctctactaaaaatacaaaaattagccgggcgtggtggcgggcgcctgtagtcccagctactcggggagctgagggaggagaatcactttcaccacggaggcggaggttgcagtgagcctagatcacgccactgcactccagcctgggtgacagagtgagactccgtctcgggaaaaaaaaaaaaaaaaaaaaattagccgggcatagtggggtgtgcctgtggtcccagctactcagttggctgaggtgggaggatcacctgagcccaggagttccagaccaccctggggaacatagtgagacccca[170 bp omitted]gtggcgggtgcctgtcgtcccagctactcgggaggctgaggcaggagaatggcgtgaacccggggagacggagcttgcagtgagccgagatggcgccaccgcaccccagcctgggcgacagagcaagactacgtctcaaaataaataaataaataaataaataaataagccaaggatgatgatgcacacctgtagtcctagctgcttgggcgactgaggcaggaggatgccttgaacccaggagttcatgtaggttgcagtgagctgtagttgcaccactggagtccagcctgggcaacagagcaagaccctgtgtaaagaacaaaaaaagtttatgtaacattttagaaatggaattagggttagggatgagggtgcggggagggtgcacaaacagcaagagatcctgatggtgatggaaatgctccatgtcatgatggtggatacacgaatctacccaggccagcaaattataggagactaaagacatctcacacactcacacacacgatcacaagttaaactgaggaatcctgagtaagattgatggattgtatccatgtgaaatcttacttatatgttttttagagatggagtgtccttaatgcaccccaggctggagtgcaattttgtgatctcagctcactgcagcctctggggttcaagcgattctcctgcctcagcctccggagtagctgggattacaggcgcccaccaccacgcccgactaatttttgtatttttagtagagatggggttccactatgttggccaggctgctgtcgaactcctgacctcgtgattcacctgccttggactctcaaagtgctgtgattacaggcgtgagccaccacacccgtttttgttttgttttgttttgttttgtttttgttttgagatggagtctcactctgttgcccaggcgagagtgcagtggtgtgttctaggctcagtgcaaccaccgcctcccaggttcaaacgagtctcctgcctcagcctcccgagtagctgggactacaggtgcccgccaccacgcccggctaattttttgttgttgttgtatttttggtaaagaggaggttccccatgttggccagcctggtctcgcactcctgacctcaggtgatccacctgccttggcctcccaaaatgctgggattacaggcatgagccacagcactcggcccttccctcctttctttctgagacagggtcttgttccgtcacccagactggagtgcagtagcaggatcacagctcaatgcaacctagaagaattcctgtcgtcctgtgctcatgagatcctccctcctcttgcaactgcatatgaattgacaattatttcaataaaattttcaattaaaaaattatgagggctgggtgcggtggctcactcctgtaaccccagcactttgggaggccgaggcgggcgaatcacgaggtcaggagttcgagaccatcctggctaacacggtgaaaccctgtctctactaaaaatacaaaaactagccgggcgtggtggcgggcgcctgtagtcccagctactcgggaggctgaggcaggagaatggcgtgaacctgggaggcggagcttgcagtgagccgatatcacgccactgcactccagcctgggtgacaga[225 bp omitted]gaggcaggagaatcgcttgaacccgtgaggcagaggttgcactgagctgagatcgcaccactgcactctagcctaggtgacagagcaagcctctgtctcaaaaaataaaaagagaaaaaaagaaaaaagccaagaaagtggagtcttttctgcccttgaaagggtagtggtaaaactctctgggtggtgtggggtgtccaggtatctctctgtcgcccctaacactgggcgagactggatctgttttgcataaaggaagaacacatttctgtgtcccctgccagtcatccatgcaatcatcaatttcgttgttgttgttgttgtttgagatggaccttccctcttgtcgcccaggctggagtgtagtagcatgatctcggcccactgcaaccttcacctcccgggttcaagcgagtctcctacctc[212 bp omitted]gcgtactagcgctgaactactgggcgagggtcggccagcggcaggaaaacggggaaacaggtgcgcccgtttgtgcgcgggggaagctcgcagccacgagcgaagggacctgtgtctccactttggacaaatctcccgggaatttcccgggggttcagagctccgatgtcggggcggggaggggcagggtgtcatgtgcggcgctggccacacggtggcgacagagaacgtgccgttctggtccagcctggcggctgtggggtcgaaatggggaaggagttggggtcgcgatggagtcggggaggcagtggggtaggagcgagggcccccttttttttggagacagagtttctcgttgctcaggctggagtgcaatggcgtgatctcagctcacctcaacctcctgggttcaagcgactctcctgcctcagcctccagagtagctaggattacagacatgcaccaccacatccggctaatttttgtatttttagtagagacggcttcgccatgttaggcaggtctcgaacttaggacttcatgtgatccatctacctcggcctcccaaagcgctgggatgacaggcgtgagccaccacgcccagccgagacagcctacccactgtgggctttggcaataaggcgctcaatcaattataataaacacctatggaattaattcccgtctgtgttccccaaaccgtcctccccaacccccaccgccgcccagtaattcagggaccacaagaatggaggtctctggcttataactctcactgagaagcctgatgcaggagctcacacctgtaatcccggcacttcagtaggccaaggcaggaggatactactgagcctcggtaatgtattgttttttattttttttattttatcatatatatatttattatactctaagttctagggtacatgtgcattctcagcaaactattttttcttttatttttatttatttatctttttatttttgagacggagtctctctctgccgcccaggctggagtgcagtggcgcgatctcggctcactgcaagctccgcctcccgggttcacgccattctcctgcctcagcctcccgagtagctgggactacaggcgcccgccaccacgcccagctaattttttgttttagtagagatggggtttcaccgtctcgaactcctggcctcattgatcctcccacctcggcctctgaaagtgctgggattctaggcgggagccaccgcgccccgccaaggctgggtaatttataaacaaaggaggttcctggactcacagttctgcatggctggggaggcctcagcaaacttacaatcacggtgcagggggaaacaagcgtgtcttacctgactcaggcgaaaagagaggaaggaagagcagggaaaactgccttataaaaccatcagatctcgtgagatctcactcactatcagagagcagcacgagggaaccgcccccatgatccaatcacctcccacctgctccctctctccacacgtggggaccatggagattacaaccgagatgagatttgggtggggacccagagccaaacctcctcaggacctctgtcccccctcctctcctcccactgcctctgggcacgctggcacccctgcctcctcttccctggttggtctttggtgagatgtgtgtccattggtcccagaacctggcgttgcccaggctggagtgcagtggggcgatctcggctcactgcaagctccgcctccccggttcatgccagtctcctgactcagcctcccgagtagctgggactacaggcgcccgccaccacgcccggctaattttttgaattttttagtagagacggggtttcgcc[138 bp omitted]ctcacacctataatcacagcattttgggaggccaaggcaagtggatcgtttgagctcaggagttggagaccagtctgggaaacatggtgagacctcgtctctattaaaaacacaaaaaattagccaggcacagtggcacatgcctgtaattccagctactcaggaggctgaagcaggagaatcgctggaacccaagaggtggaggttgcagtgagctgagactgtgccactgcactccagcctgggtgacagagcaagactctgtctcaagaaaaaaaaaaaaaaaaaaaaaaaaaaggccagtctcagtggctcacgcctgtgatcccagcactttgggaggctgaggtgggtggatcacctgaggtcaggagttcgaaactagcctggccaacatggtaaaaccccgtctctactaaaaatacaaaaactagccgggcgtggtggcaggtgcctgtaatcccagctactcaggaggctgaggcaggagaatcgctttagccccgggaggtggaggttgcagtgagccgtgatcaagccagtgcactccaacctgggtgacagagcaataacctgtctcaaataaataaataaataaataaataaataaaattcaagcttagtagaataaaaaattcagcttcccagttgtcctcgcatttcaggtgacaaatcatgcacagctggtggctttgtatcacacagtgcagatttagaccattcccataatcgttttcatcattgtagaaagttctattgaacaacgctgggctagaacattctagaagattctagaaagctccaacacaggagccagcagccacctgagggtaattacatttaaatttagacttaaattctgttggctggtgaagtccagcacatgctggtttggtttttttttttttaggggtgaggtagttagactgcagcaaaaacaggggctcccatcacagttctgtgcagggggtgagtgagactgaagaaaccaaagaccatatcccaattcactttctgaaatcatctcccgttattttcacctgttctctgattactctttgttccctgcgtgtgccctgtcatcccacctccacacctttgccatactgtctccctttgacccccacatccaaccagccctgtctagccttctgcagcatccccaagcagaattcactgggcagaattaatctctctctcctctgaactcctgattcacccatccatccacccatcccccttcctgtccacccatccacccatccatccatccaagcatccacccacccatccacccatccaaccatccacccactcatccacccacccactcatccacctgttcacccatccacccatccattcatccatccaacgatccacccacccatccatccacgcatccatccatccgtccatccatccaaccatccaagcatccacccacccatccatccatctccaaccatgcacccactcatcccttcatccatccatccatccatccatccatccatttacccaccctcccatccatccactcacccatgcacttgtccacccatccacccatccatccacccacccatccattcacctactcacccatgcacttgtccacccatccacccatccatccacccacccatccattcacctacccacccatccatccatccattcgtccacccactcccccatccccccatccaaccacccattcctccatccatcaattcacccacccacccactcacccatccatccatccatccatccatccatccatccatccatccattcatccactcatccactcatccatttacccaccctcccatccatctacccccccatccacccatccatccatccacccatccatccatccatccatccatccatccatccacccaccctcccatccatccacccacccatctacttgtccactcatccacccatccatccacccacccatccattcacccacccacccatccatccatttaaccacccacccacccacccacccagcaacacatccatccacctacccatctaatcatccatccatccatccatccacccacccacccatccatccatccattcgtctacccacccacacctatcccccatccaaccacccattcatccatccaattcacccacccatccactcacccatccacccacccatctactcatccatccgtccatccatccatccatctactcatccaccatccaccacccacccacccacccacccattcaacatccatccatccatccatccattcactcacctgcccatccacccacccatccatcccctccagaatgtaagcatctgacgtcagtgattgcgagggcgcctatagtgggccagctcttactgagcacttgccctgtaccaggctctgttgctcaccagctggtggtttacccttggttaagcccccaattccccatcctacggatgcagaaaccaaggttgagaaggcgaagtgacacgcccagggacagcccaggaaggtggcgcggcagacaggggctcaggcatctgactctagagcccaccattttcctcatgcatggtggacatggggcacggtctctaccctggggacatcccaagggacacacggtgtgtggatggtgcgttcttcccaccaagggacacaaaatgtgtgggtggtgtatccttcccacgtggagcctacagatgggagaaccacagccctgcccctcagtgtcccccgtgtctgatgagacctggaacaggggattttcagcagacattggactagggtcaccccaccatgccaagtccatgagtcaaaggaggtgaatgacaatagcaatgagactttgtgcccaggacacaggccaggcctcagcccttggcttccctgagctgtgccgagacatggagaggccaatgcatgggatccttgctttgccattgctgcccagcccctctagaaaattcttccagctccttggtcagaaatgtggtccctgtaggtggttagagtttcagttgttccaactgctattagctctgatgatggaaaggttggcatggaaaagttggctttcaggcacagctggatccagggcctcgtgcagcaactttaagaatccagactggaccggatgcagtgtctcatgcctgtaaccccagcactgtgggaggctggggcgggcggatcacttgaggccaggaattcgagacctgcttgggcaacatgaagaatccccgtctctacaaaatatacaaaaatttaaaaatatacaaaaaattagctaggcatgatggtatgtgcctgtggtcccaactactagggaggctgaggtgggaagatcgttgcagtccaggaggtcaaggctgctgtgagttatgattgcaccaccacactccagacagggcaacagagcaagaccttgtctcttaaaaaaacaaaaacagaatccatctctggccatctcttgtgctgtgcccaaaggccacagacacttcagactctcatgtgccagctgagcaaccctgcagtgggagtgagctcatccctcggatgtctccggaagtcctgggaccagcatggtgacacccctggcccctggctggggggcctcagctcctctatatcactacatcagaaacgcctagagcaggtcctggccagtctagacttgggccctgccctggcgggtcacccagcagcctccccaagctttgccattcccttccgccgggcaattccccaccccacctcccagggtctttgcgcctagctctgtcatgtcctctcttctcccaatttttttttttttttcgtcgttgttgttgacagagtcttgctctgtcacacaggctggagtgcagtggtgtaatctcggctcactgcagcctcaacctcactttgctcaagtgatccttccacctcagcctcccgagcagctgagactacaggtgtgtgccaccacgtccagcttcctcccagtgtggaggtgcctctcctctccccagcctcccctgcagttaggtgacaaactgaccccacttggggctccccggaagcagagctgctccatgacaccccctgaatccttgcagcaccagacaaaatcatccccttctgcccactctatcggaacccgggggctgcaggaaccctcatatccttccaaaagactctcctccacccctttgacatttgtcccatctttgatccctcgaccccttgggggctgctctcattctctccatgacccaattgcagagaggggaggggggcatccgcacacccgcccctccctgcggccttctgcagtctggctgaggcacgaagtcagcccaggtcacagggtgtgtggcctgcagccgaacccagccgctccgcacagctgtggccagacccaggttaacagtccctcccggctgggcgtggtggctcacacctgtaatcccagcactttgggaggccaaggcaggtggatcacgaagccaagagattgagatcatcctggacaacttggtgaaaccccatctctactaaaaacacaaaaattagccgggtgtggtggtgggcacctgtaatcccagctactcaggaggctgaggcaggagaatctctggaacctggcaggtggaggttgcagtgagtcgagatcacgcccggctaattttttgtatttttggtagagacggggtttcaccgtgttagccacgatggtctatgatctcctgacctcgtgatccacccaccttggcctcccaaagtgctaggattacaggcgtgaaccac[184 bp omitted]gcggcaggcacctataggcccagctactcgggaggctgagg[132 bp omitted]acaaaaaacactcattattagatttaaggcttgctctaattcaggatgatttcatcttgagatccttaattatatctgcaaagaccttttcccaaataaaatcacattctcactttctgggggactccttattttggtggggggactccattcaaccaatgacacgcccctcagtctcaccgagagggagtttgggcctcgaacaccctgcgttttgcggaggagggagttccaggccaggggcctgggtagggctgggcttgaactcaggtgtgcgtctctggtggttcctctctcctcctcgcctcctcctggaagctctccaggcctctcttccacacgtgcttctctttccctggtgggttctaagtcccaggcccctccccaaggtccactccccaagcctgcagcctgtgtgcccggccccttccttgtccccggagtggcccatcctgacacccaggggcttcctggctgttttgggatggcgcgctgggacagctcaccatgggtccagcctgtggtctttttttttttttcttttttttttttttttgagacggagtctcactctgtcacccaggctggagtgcagtggtgcaatctcggctcactacaagctccgtctcccgggttcacgccattctcctgcctcagcctcccaagtagctgggaccacaggcgcccaccacca[176 bp omitted]ctatatctggtggccccatgtgtctgtcatggctcccagagcagtggggggatgaccacggctcaaacgtccttcacagaccaggatgcatcggggtcaaacctgggacgggcatttccaggcctcagtttccccatctgcacgaccgctggacggtctgttgggatggatcccacacacccagagagctgggcagatgtccctgaggaaggacagcctgggtcccctttctctgtgggatccatggttgaacacccacagggatggggaggacctgaggtttgctcacggggagcccagctagaccctcccccacagacccaattccttcgtctggaacaagggacagtgcctggtcggggtgagggcctggaccacggaactggggggttgaggggctggatccgggtgtcccctgccccggggtctcccctcctggtgcccatcccccacaccacgctgaagccgtgtgctcacatgtagaaaagaggctttattaagaaggctttgaagtcaaaaaataaaactcttgatacaatttttttaacccttaaatcagctcagcaaatatataatcagtaatttagctgtgtaagattaaaggtccattactttatttaaaataaaatatattttagttcttaaaatttattccataaagtacatatttccctataaattccctacatatacacaagaggtaaaaagtaaaagtaaaaaaaaaaaaaaattaaaaaaattttaaaaatgacaacagaaaccgcagtaaaaaggggattaataattaacagaaagttagaaatttgattggaacgcccctcgcccccgcccccctgccccctccggccgcgcacggttgatgtacaaaagcataaatggttagccccaaaaagggagtaaaaatgtcaccctcctcctctggaacgtctgtgcggcctgagaccggccggcgagaaaagtcaaatcagaaaacggcttcggacgaaaggaaaaaacgctgagcgctggaaaagtcgtgttttttgttttgcttttttaaagatcaccctggaggggaggggtgtctaaaaataagaaaactaaaaaaagtgcaagcggaccttttctctccggtttattgtaacctgaccactcaatactgtcgttgaagggctgaggcgccgccgggctgcggggtctccgtctccacgcctgaggcggcagttaaagctcatctgtaaacactggccgccgcccacccccctgccccctcggcctccgcccctcgccccctccccgtccctctcccaccccgggtcccgccccgtctcccgcgcccacccctggcccccgcagatggccccggccacgtggtggtccgcgctctaggaaaagatatgaatggcctgggtggccggcgtgcggcaggcgggacactcgggctcgctcttgccgcagatgcggacggcgcagtccatgcagaagaggttgtggccgcaggggaccagcgcagccatcacctcgccctcggcgcacaccacgcactctcgcgccagggccggggccgaggacgccgaagggggcttgcggctgttctcggaggcgccggagtccaggggggcgcaggcggcggccgcggggctgctgggcagcgaggtggccgtggagaaggcggcgccgcctgggaaggatacggggccctgcgggggtcgccaggacagcgcgcccaccgggtccggggcgccacggcgagacagcgggagctccaggcggaggccgccgggctcgggcagcgtgggcgagtggcggggggtcccggccccactgctgcgccgggcgccggcggcgggaggtcccggggctccgttgaccgtggagcagccgctgaaggcgggcaagggggcggcgcgctcaaaaggcgcccagatggtggccgcggcgggcacggtcaggtccagcgccaggaagtcgaagtcgaagccgaagtcgcagtcgtcgggggcggccgtccccaccggggcaccgggaccctccgcgccgaaggcgaagcccccgttgccggagccgctgtaggggctggcggggcctgggtccggcacggaggggccgccgcggctgcccgcgtagaaggcctcgggggcgctgggggcgcccagggccgtgtccccgcggaggccggccgtggccgtggggggccgtcgtccctggttgggggtcttggcccagaggctggcggccgccccgagcaggtccaggcagacgtcggtgccgttggcgtggaagtcgctgtcggggcccgcgtcggtgaaggcgccagtgcgcagcgtgatgtgcgcctcgatctcctcgcgcgcgcggtccacgttctcgggcatcccagtgaccgcgaacaccggctccttgtcgcgcccgggcgtcacgatgtaggtgtgcgtccgctgctggatgcgcttgatggtggcgcccttgggccccaccaccagccccaccacccggtagggcacgcgcacctggatggtggtctgtccgggaaggttgggcgggccctgggcggcgccgggcagacccccggccttgctgcgcgtggcgcggatgatggagaagtgttcggccgccgacaggatctcacgcttggccatctccacgtcctccttccggccggtcacgatgaagaccggctcctcgccccgcactggggtcttgatgtaggtgtttgtcttggcccgcagggccttgatcttgcagcctgtccgggagggaggggaaggacaaggtgacccagagccccctgcgcagctcagccccgctgggcatgcaggctgcagggccagtgagggagcccctacctcccagcctgtgcccaacaacactttatcctcagacacgccacgtcccttcttccctcagcctcagtttcccctctgggctcgagtttggcctaaaagcaagacggcaaggggaccctgttttaggttgaaaggtgtgcgccataatttatgttcccctggaaccgcagtgtgacggctggggtgtgaatgtttcccccaagttcacaagctggaccctaatatgcggcgttgacagtattaatttaatacgtagggtcggctgggcccgtggctcacccatgtaatcccagcactttgggaggccgaggcaggtggatcacttgaggtcaggagttccaaaccagcctggccaacatggtgaaaccctgtctctactaaaaatacaagcaatcatccgggtgtagcggcaggcacctgtagtcccaggtacttgggaggctgaggcaggagaatcacttgaacccaggagacgaaggttgcagtgagccaagattgcaccactgcaccccagcctggacgacaaagcaagactccaactaaaaaaaaaaaaaaagcggggtgcagtggctcacccctgtaatcccagcactttgggaggccaagttgggtggatcacgaggtcaggggctcaagaccagcctggccaacatggtgaaaccctgtctctactaaaatacaaaaaattagccaggcgtggtggcaggcatctgtagtcccaggtactcgggaggctgaggcggaagaatcgcttgaacctgggaggcagagactgcag[132 bp omitted]tcccagccactggggagggctgaggcagaaccgcctgaactcaggaggtggagggtgcagtgagccaacatcatgccactgcactccagcctagccacagaccaagactccatttcaaaaaaaaaaaaaaaaaaagagccacagtggcagggtcagtggctcacacccgtaatcctagtacttcgggaatctgaggcaggaggatcactggagcccaggagtttgagaccagcctgggcaacacagcaggaccccatctctactacaaacaacaacaaaaaattagccaggtgtggtggtacacacctgtagtcttagctactcaggaggctgaagtgggaggatcacctgagcccgggaggtggaggctgcagtgagctatgatcacaccactgcacttcagcctgggtgacagagcaaagccttgtctcaaaaaaagaaggaaaaaaaaaaaaaagacacacacacacagagaagctggccttgtggagacacagacagagactgcagtgatgtctctacaagccaaggactggccatagcccccggaaactgaaggcgccccccgccctgcccacaccttgacttggaacttttatcttacagaaatgagagaggagacgtttccatggtttcaagcccccattgtgtcagcccagagagcaactggagaccctctgacaccacctcccggcccaacaggaggggaagccgaaattcagattgtggaaactgcctacaattttcttccggccaaatgaccctccctaggctaccaagaccctggcctaaggggagccgaggtctcggcccgactgcagacgcccgcaccctgactccagatgcctccgaggcatccaggtgggccctgaggggcctgctgtggctttgttcttgttggctgggctgggggtctgacctggtgagggacatgagtgtcagtgtgggaggcagggctctcctcaccgattgtgtaggcaaccgctgaccaggtatggccttcttggggtcccagacatccctaccccacccctggggccttaatggtttttttttttttcttttccttttttgagattatctcactcttgttacccaggctggagtgcagtggtgtgatcatagctcactgcagccttcaactcctgggctcaagtgatcctcccacctcagcctccagagctggcaccaccatgcccagcttaattagttattgagacggagttttgctcttgttgcccaggctggagtgcagtggtaccatctcggctcactgcaacctctgcctcctaggttcaaacaattctcctgcctcagcttcctgagtagctgggattacaggcgcccaccaccacacccagctaattttttttatttttagtacagatgggattgcaccat[138 bp omitted]ccaggctggtttcaaattcttgggctcaagcagtcctcctgcctcggcctcccaaagtgctgggatgacaggtgtgggccactgcgcccggcccgtgaaggagttttgagccactgctcacaacccctcaggctctggggaagcagagggagctgcagggatgtttcaatacagtcagaaggtggctctgaggggaaaacagtgttgctaactctcccacagtgcaagagatgaaatgagcaggatcagcacttttgacggggaagaagtcagaaactgcctgggccaggaagatggaaggcgtgggacctggaggctggtggtcccaggggctcggtagggaggaccctgggaggggtggcgggggtgcacccactcggaggaggacagcagttttcccgccccagctgcactgccaccacacctgtccctcccagtcgcagcattctgttcacctccattgcacccagtcccctccattcttctgtacagtccggtgtccccctcctccaggaagcccaccctgactgcatcgggttgggcctgctcttctgagtctctcctaacatgcctgactctctgagctgcctccctgaggctggaggatggggctggggattccctcggcacttgggggaccttgctatgcctgtttcttcactgtgaaaggggaaggtaacaggcctggcttcacaggcccggcttcacaggccctcagagggccatgaccaggccgttggctcctggcagccaccctggcaggtctcactgcagcccacagtgtttgctttagatagatcctccttgaggaagggaaactgaggcacagggagtggagacccagcaaggctggggaaggaggtgccacccacagatggaggctccgctggccctgcccacaggcaggaagtgagcctgttccccatcacgccgacccggcagagggcagagcccgccagcgttgccagggtgcagcatggggtcctcccttgctgatctgggagccgccccgggtccccagagggtcacacgtgggagaggctgccccgacgtggccaccgctgagctcacaggctgtggtcacagaaagtctggtctgggtgagatgacaaatttgggagatggaggtggcaaggaagggggcgtgtgactgtctgagcagaaaccaggatggtgctgggagccacgcgtgcgtcggggcaggggagggaactggcgcctccccctccccttactccatcctgccctaacccagacggtggcgctgggtggagacctcacagctagaaggcctctaggacctcaaagacggagctggagctcaattcattggtgctgcgtctgctttgacacgtgctggcccccaaaactccacccacatcaagacgccaaggggccaaggaatcggggctccaggagtgatcccagcccacccctgccccactggaaatgacacagcgaggctagagggacaggaagcctgaagggcgggctctgggggacaccgaaggttggcaggcactgaaatgcagattcgtgggccatgtccccagaattccaactcggagggcttgagatgcctgggaatcggggtgaccaccccagagtctggccctgacctgtcccacacccccaacccacagcagccaagtctccccctaccagggccccacgcagcacacacaccagcgggcatcactcatccagcccgtccagggtcctggctgcaatgaccgtgcactacgacttaccaatgaaaccacaagtcctggtgtgggagccgaggccaccagcccaggctggatgggtttgccatggcaggaaggggaatgtgaaccccagggagccgctgaggcaacagcaaggacaggattctagaagcaggacggggcgagaacaaggcctcacagccaacactcagtccaacacgcagccgcccccagccaggcagccgggtgacgcgggacagcagcatcccagacctgggccactatggaagccagcgggagctgaggggtctggtggggaggagggaagctggttcagctgtcaaacagggatgtcaaaaccccctcccaggccaggaacagtggctcacacccgtacgtagttccggcactttgggaggccaaggcaggaggatcacttgaggccaggagttcgagaccagcctgggcaacatagcaagatcctgtctctataaagggtgtcacctgtcgcccaggctggagtgcagtcacagctcactgcagccttgacctcctgggctcaagccatcctctcacctcagcctcccgagtagctgggactacagttatgcaccaccacccccggctaattgtttaaagcttttctgcagagacagggtcttattatgttgcccaggctggtctggaactcttgggctcaggtgatcctcccatctcagcctcccaaagtgctaggattacaggtgtgagccaccatatccggcctctacaaaaaatttttaaaaattagccaggtgtggccgggcacggtggctcacacctgtaatcccagcactttgggaggcc[134 bp omitted]gaggcagaagaatggcgtgaacctgggagatggaggttgcagtgagctgagatcgcgccactgcactctagcctgggcgacagagtgagactccgtctcaaaaaaaaaaaaaaattagccaggtgtggaccgggcacagtggatcacgaggtcaggagttcgagaccagactgaccaacatggtgaaaccccatctccactaaaaatacaaaaattagccgggcgtggtgg[131 bp omitted]caaaagaaaagaaaagaaaagaaaattagctgggtgtgttggtgcgcacctgtggtcccagctacttgggaggcagaggtgggaggatcgtctgagcccaggaggttgaggctgcagtgagctacaatcacaccactgcactcaggacagagcaacagaaccagaccctgtctcaaaaacaacaaaacaaaacaacaacaacaagaaaccgctaggcgtggtgactcacacctgtaatcccagcactttgggaggtggaggcaggcggatgacctgaggtcaggagttcgagaccggcctggccaacatggcgaaaccccgtctctactaaaaatacaaaaatgagcctggcgtggtggtggcagatacctgtaatcccagctactcgggaggctgaggtgaaagaactgcttgaacctgggaggtggaggctgcagtgagccgagactgagccactgtactccagcctgggcgacaagagcaagaccctgtctcaaaatgaaaagaaaaaaacctctcggggaatgaagggaacatgtacactgtactaacgccagaactctcagttgggtctgcagtgtggaggtttcctagcagagcctttcttcctagggctctgcagtgtatggacaggaaaaccatggcatggtccccaccaacaccccagcactgtccccagctgtcgggaaaacctggggcctgcggggatgggaggagaagaggagcctctggggctgcagccaggaacaagggacaggaggggagacagtgagccaggggtcgcccccagctgaggggaacaacctaaaatcactagccttagcctgtgccgacagcagagagagcgagccctgagcagcttccagtccaggccctgccttcaacatcactcactcattcattcattcattagccacagaacaccttctgtgtacaggccctggcaagacactgaagacccaaccatgaccaagcacctgccctggttcctgtccctgggaacatgcagggggagaggctgccacggagcacagattcacccagggtgcctggcaagcggggtgagaaaggagggtacatgttggggtctcagcaggagcagggccggaggtcccctagagcacctttgctggccggctggagggagacgcctgtgcttttgggtctccactttgcctgtctcccagacagggctgcctcccctcacccccagccctcaagctttggaatctgaaattttctttgctgacccaccagagaaactgggtttgaatcccagcccatgatttttgttttgttttggagacagggtcttgctttgttgcctagactggagagcggtgacaagatcatagctcactgcagcctcgaccgcccaggctcaagtaatcctcctgcctcagcctccagagtagctggggctgcaggagtgtgccaccatgcctaatttttgtatttttttttttgtagagacagggtttcgccatgttggccgggctggtctcgattcctaggctcgagggatcctcctgcctcagcctctctgagtgctgctatcccctcagtttttacctattctttacctcttgcagcctctgcctccccatctgtgacctgggagctgcaggacctttcctggggcacattatgggcctcagtgagatggggcaggtcaagtctggcataggcttagcacacagtagaccctcaataaagatctagccaatggccaggcgcagtggctcacacctgtagtcccagcactctgggaggctgaggtgggtggatcacctgaggtcaggagtgtgagaccagcctggccaacatggcgaaaccccgtctctactgaaaatacaaaaaccagctgggcatagtggcacgtgcctgtaatcccacatactaggggggctgaggcaggaggatcgcttgaacctgggaggtggagcttgcagtgaaccgggatcgtgccattgcactccagcctgggcaacagagcgagactccatcccaaaaaaaaaaaaaaaaaaagatatagcaaatgaatgaactggagcctccagcagatgggtgggaactcagagggtttgaatgaccacagtctgcccagaaagcactcggaccccctctaggatcaagagaactgaagctcagagaacagcacgtagctactggggagagggctggtgccaggcctgtgtgactcttgtctaggtggggaggccggacaggtgcacccttcctggcctccagggaaggggtaaccttggagcttgggtttgacagagaagcatgagaagttcagagagccccagggtggagaggaaggtgagtaaaggggcagggccggggcacaaaggacattgaaaggtatgcttgagaacggggtgggtgggagaagctgggagccacagatggttctacagtgtggaagaagtacagactaccgaagctgtggaagacgtaaggactactgaagctgccaacctgtcctggcatccacagttgcatccctggcaacgcgcactccacttatggggtggccactgtgtgtgacctggagctgggattaaaaccagcaacttgggtccaggcatagtggctcacacctgtaggaaccccagcactttgggtggctgaggatcgcttgaggccaggagttcaagaccagcctgagcaacagagcaagaccctgtctctacaagaaaaactttataataaaaacaaataaataaaactggccgtgcgcagtggctcacgcctgtaatctcagcactttgggaggtgg[134 bp omitted]gaggcaggagaactgcttgaaaccagaaggcggagtttgcagtgagcccagatcacgtcactgcactccagcctgggcgacagagcgaaactccgtctcataaataaataaataaaaccagcatcttgccccagaatcctctaccctaatggaggtgagacgtccgcacatcacagagaggggccgtcatctgcgcagggccacggcggcctgcaggacaagcaatcagggcccactctacccccgacccccactgtaccccagggcctgccttgctgacggccaccagcaagagcccagtaagtgggtgcagaacgcacaggccagaggtgggggctgagcctggtgcccacagactccatttcccatggacctgcccctagagaattcccaccctgaggccacaggtctagaagctctcagcctgacgctgattcctgccagctccccatgtggccatagcctcgctcaaaggcccttgggtgccaggacaagcgcgttcacaaagaacacagccacagcctccaccacctggaggctcaggctcgtgcctttggtcacttggtccccaggcctcggcttggacgcctgtctccacaggctcccagacactccgcacagggcagctgtcccgttctaggccctgggtatgggacatggaggccgggtggaaggcctcaatggggaggcagtaacaggatggtagggcgccctcctgccagggggtcccaccaagggcagccagcaggactgagacagaacccagtccctccccacccaccactccagagcatgcttcctggggccagcaccatgcctgaccctccgtgggtccccacatgagctggacaaatgaacgaccaaaagacaggaggctgtggtgccccacccacctggaccgagggaaagggcggaggggagggcgccctggtggtcccccgcctgaggccagggccatagatgaccttgcaatcccagccccccacacctttctctggcctggattcccgagggccccggggaggcagggacccccagcccaagtgtcctgcggccccaccaccagccccgccaaggccccaccccaagttctagaacctggctgatcactggcggtcagcggggacccaggagcggggaggggtggcgggaaggcaggagaaagttgagggaggcaggcgggcgggtggctaacggggtggtgggtgtgagctgggccaggcactgcccaccacccgcccgcccgccccgcagctcgggggccaatgagcagcggccggcctgatgtcaccctgcaaatctcagcctcgctctctaacaaagagaacaatggggcggccagagggaagctccgacgatgccaccgctggaccccacacccggggcctgccgcccgccggcctgcccagcaggctgcaccccagaagtggctttgacagccggtccttccccaggccccgaaatccctgactcggggccagagagtggagcagggaccctctcctgcccggtcccgtccccaccccagtcagggccccaggctggagactgagacgtgcgctctttgtactgtcagccttctctcccggtcctgcaggcggcccccctaagccacccctaaacctgcgcttgccccgccccgccgcctgtgctgggtgtggggcgccccccgcccggccggagccccgggccctcgagcccctctctggggtgcccctgcgggcggccgagggcctgggctgcggcgcggctccccggagcctttccgggctggaggcggcccagacaaaggcggcggcggggccggagcgcgcaggggaggagcgcgggctgcgcccaactttctcccgcggcggctgcaggacaaaggcgcaaaggcagcggccgaggccggagcccacgcggggcgtgtccggtgcggggcgtccggcgcgggctgggctgggctcgggcgacccccttccccggggcggacggtgcggggacccccaggacagcaacccccgacgagggccactcaccctggcgacccacgatctcggcgacgtgctcggagctgggcaccgggacgcactcggtcatgttgacgcttttcttgcggctgccgatcacgctcatctggtcggccagcagcgtcgggggccccagggccgcggggtggggcgcgaagcccgcgaacacgtcggggggcgacggccggggcggcggcggcggcgggggactcgcgttggggtccagcagcggcagcgacccgggggccacggcgggggccagggtcgggggcgcgccggcctcaggtccgtcggggggcacaggctccggagccgccccgccgtccgcgccccccgccgccgctgcgccgtccccggccgccccctcctcgtccgtgtcgccagcgccccccagcccgagcgccgacagctggtccagcgccaggcggagcgcggcggccgcgtcgtcgggttcgggcggcggccggggcgcgggcgcggcctcctgggcgccctcgggcgggggcgcaggtccgggtccggggtcctcccccgccgcccccacgccgccgccgccgccgcccccgcccccgccgccgtcgggctggccgagcgagctgggcatggcgggagctagcgctggggcccgcgctcctgccgcccgcgccgccgccgccgcccgcgccgccctccgcctctgcgagctgggccgccggccgcctgcatccagcggcgggggcgggcacggggggccgggcgggcggggcggcggcggcgcggggctgctcggggccgggccgggccgggccgggcggcggcagcgactctggctgcggctcggcggcggcggcgacggcggcggcggctcctcggcggccgaggcggcggcggcggcgcgggacgctccttccctcccgccgcctcccgcggccccgccccggccccgcccccgcgacgtcacgccgcggcccaacaatgggcggcccccagggcgcaggcgcgcggggcggggccggggcggggccggcgccgggcacgtggtccaggccccgcctccgcccggcgctcgggcgggaacccgggcgcatccgcacgtgcgggcgctgctgcaggtgtgtgcggctcagcccctgcctggacagcgctccctccccaagcctgagagtccctgcctcgcgcgccccagggcccgaggtcccgctccccaatttcccctagagatccgggtcgcccccaagcgaggtctcttgctccacgcccgcttccttgtgccagggacccccacctccctgcataaaggcgtggggtcctctccaagtccccctcgcgatcccactggacttcgaagtcaggctcctgcccgcccaccgcctctgtgccagggtccaacccccgccccacggtgcaccccccagggcctggggtcccagtccccaagtaccccttgctatcaggtgggctttagggtcaggcccctgccccacccccagcctctgtgccagggacagctccacaatcatgcacaccccagggcctgaggtccctctcccctagtctctcctagctcccctctggctggctcccggctttgggatcaggccacctcctccacgccacctcctccgccccacccaaggccacagacccggtctctgtgcccccagccagagacctctctaccacagtggtgcttccatggcgagggcaggctcacaccagccagaaccctccatgtggagccccaccctcttctggggtgcctttccccgcaacgggcgttgtccacct[138 bp omitted]acaaaaattagccaggcgtggtggcgcgcacctgtaatcccagctactcaggaagctgaggcaggataattgcttgaaccctggaggtggtggttgcagtgagtcgagattgcaccactgcactccagcctggttgacagagcaagactcctctcaaaaaaaaaaaaaaaaaaaaaaaatagccgctttcccagcggctcttcctccagctgtccttcggggccttccttgcacctgtggggttttttgtgataaacctgtctggctgggtctacctgcccccctcttctaccagacctgtccctggctggctgtgcaaacttggaccgaaggcagggctctctgggcaggagtggggcagcctgcccctttgcctagcaaggcttctcctctgtcccctccccccgcctcacacaccctgggtccccctcagccactcttctagtccctcagccacagccacccactgctgggcccttcacttttggtggcttctctgcccacttcttccaggcaggcagggtcaggatccccctgcctggagcccttccccacccaaaatctctctcctgaccccaggctgcatccagccccacttcccctcctggggtcctggacttctctttcgtgcacgcccatgcttggaattgtttttctatctctctttctttctctctttctttttttctctttctttcctttttttctttctttcttcctttctttcttttctttttctttctttctctttcctttctttctcttttttcttttccttttctttctttcctttttttctttctcttccttttcttttttctgtctttctttccttctttcttttctttcttctccttccttccttgcttccttccttttctttcatcctttatttcgttcttcatttcttcttttctctcccttccttccttccttccttctttctttctttttttttttttagacggagtctcgctctgtcacccaggttggagtgcagtggtgcagtcttggctcactgcaagctccgcctctgggttcacgccattctcctgtctcagcctcccgagtggctgggactacaggtgcctgacgccacacccagctaattttttgtattttttgtagagacagggtttcaccgtatcaaccaggattctcccttccttctctgctcccctcccctctcctctcctttccttttctttctttttcggacagagtcttgctctgttgcccaggctggggtgcagtggctattcacaggtgtgaccccaggacagatcagcatgagagctttgaccagctccgtctctgacttgggtaggttcagccctccttaggcaacctggtggtcctcccagtccagggaggtcatcatattaatgtagacgctggatcagcatagctcactacagctcagaactcccgagctcaagcaatcctcccgcctcagcctcctgagtagctgggaccacaggtgtgcaccaccacaccgggctactttttgtatttgtagagacagggtcctttttgttgcccgggctagtcttgaactcctaacctcaagcaatcctcctgcctcagcctcccaaactgctgggactacaggtgggtaacactatgcccagccacttgcaattattaatggcattgtcagccgggcgccgggcgcggtggctcacgcctgtcttcccagcactttggaagtccaaggcaggtagatcaccttaggttaggagttctatatcaacctggccaacacggtgaaaccctgtctctactaaaaatatgaaatgagccgggtgtggtggcgtgagcctgtagtgccagctgcttgggaggctgaggcaggagaatcgcttgaacccgggaggtggaggttgcagcaagttgagatcacaccactgcactccagcctgggcaacagagcaagactctgtctcaaaaacaaacaaacaaacaaagaaaaaaccctgtgtctaataaacaaatgaatttatgaatgaatgaagcaatgaatatttaattctttcccagttttggagcctcagagtcaaaactcaaggtgtgcgcagggccgcgcccccttcaaaggctctggggagcgtcctttctgcctcttccatcttctgggggctctgggcctcatcgctcattgtggcctcatcgctcattgtggcctcatcgctcattgtggccgcatcgctctgacctcggcctctgtcttcacacacccatgtctccctgtatgtgtcctggtttccctcttctcatgggaacaggagtcacgggatgagagtccaccccctcccgtacaactttggcttaacttgtctgcagagaccctctttccaaacaaggtcccattcagaagttgtggggttgaggacacagacatctttgtgcggacatgattcaacccataatatacctccttggttgtgacagcccagatgcccacaaacgtggcccctgggcccagagtcacctcaggtgggaagcgctggtgtaggtggtggcactattgtggtcaccgtgaaatgtgaaattctctcaggcccactctgcatctgatgttttttactttttcttttcttttcttttcttttttttttgagacggagtctagctctgttgcccaggctgcagtgcagtggcacaatcccagctcactgcaagctccgcctcctgggttaaagcgattctcctgcctc[134 bp omitted]tggcctcccaaagtgctgggattacagccatgagccaccacgcccggccgcgtctgacattttttcatgggagaatgttggaagaaaatcacataggaagggaggcattttgaccgggcagggtgggggttatgggagacaagaggagccgtgatcatcgctgatgaagcccaggggtgggcctgggggatccattgtcttgcttaggatacagtttttttttgtttgttttgtgtttttgagaacggagtcttgctctgtcactcaggatggagtgcaatggcgccatcttggctcactgtaaactccgcctctcaggttcaagagatgctcctgcctcagcctcctgagtagctgggattacaggtgcccaccacgcctggctaatgttgtatttttagtagagaaggggtttctccgtgttggtcaggctagtctcaaactcccgaccccaggtgatcctcctgcctaggcctcccaaagtgttgggattacaggcgttagccaccgtgtctggcctatttattattattatttttttgaagacagaatcccttcactctgtcgcccaggctggagtgcagcggcgtgatctcagctcactgcaacctcttcctccctggctcaagggattctcctgcctcagcctcacgactagctgggactacaggcacctaccaccatgcccagctaattttcgtgctttctagtacgtgttggccacactggtctcaaactcctgacctcaagtgatctgtctgcctaggccctgcaaagtgctaagattacaggcgtgtcccaccttgcccagcctgtacaaaaaatttaaaaattagccgggtctgatggcacacacctatggtcccagctacttgggagtctaaagtgggaggattgcttgagcccgggaggcagaggttgcagtgagctgagattacgccactgcactccagcctaggtgacagagtgaaatcctgcttcaaaacaaagaaaaaaaaaaaaaaggccaggtgcagtggctcacgcttgtaatcccagcactttgaggggccaaggtgggggcagatcagtggatcacctgaggtcaggagttcgagactagcctggccaacatggcaaaaccccgtctctactaaaaatacaaaaaattagccgggcgtggtggcacatgcctgtaatcccagctacttgggaggctgagacagaattgcctgaactggggaggcagagattgcagtgagccaagatcgcaccattgcattccagcctggcgacaagagggaaaccccatctcaaaaaacaaaacaaaacaaaacaaaactcagaaaggaaaaggaaaatgcacagggagaatcctgtgatggagaaggaaggcaggcaggacagcagagacaggagcattttattgcttgtaaattacatctcaaaaaacccacttcacacacgttaactggaaatatcttcaaatgaacggccgtgagcgtggttattttggtaaccagagaaggctaaaaattaaaactgtgaaaattaaaactgagcagggaaggcagttttgtggtctcatattatttgccctcaacaaaattcttttgcccgtggccaacatggtgaaaccctgtctctactaaaagtacaaagattagctgggtgtggtggcgggcgcccgtaatctcagctactcagcaggctgaggctggagaatctattgaacccgggaggaggaggttgcggtgagccaagtttgcaccattgcactccagcctgggcaacaagagcgaaactccatgccgaa[132 bp omitted]gaaaccccgtctctactgggggtggtggcatatgcctgtaatctcagctacttgggaggctgaggagggagaatggcgtgaacccaggaggcagagcttgcagtgagcagagatcacaccattgcactccagcctgggtgacaagagtgagactccatctcaaaaaaaaaactgtggaacattatcattaacttttgtgggtgccctttagccatttcccccagtccccataatccccagtcactggcacccacgtgtccccttcctgtctctgaatcggcctgtcctggacattcacacaaatgggattgcacgccgtgtcggtgtctgtgtgtctcttgctgagggtggactcctccaggggcatctgcgccgtggccggtgtcagagcctggttcctgttcatggccgagtcctgctccatggtgtggccgggccgggctgtgttcgttcatccctggatgggcacttgacttgtttacactttttggaccccttgaatctggagcgagtgtgacagaatctcacaggcagtgcccagccacccgctaccagaaagctgagtcttgctccggtatggccctgtccgaaagaacgttccggaagctgggggtgttttccatgggcacctccgggctcctggagatttgctgtgacagccatgagggacacacacaggcgaggggcatccccggggatctttgcggtggcgagtgtgtgcggtggtcagaagggctgtccctgtctgcctgggtctgggggctgcagggacagcaaggcacgggccctgggtgtggcaggagaggcatgatgccccttagctggtgttgctgagactcgggagccctgtggtccgtgtggctgggccgagggctgggaggtgcatcctcgccacgggggtcctgagcctctcctccctggtaccctctgtggcggcagcggtggggagcttggtctgaggggaggcgggggacacgtgaggctcttgctgctgctggcaagtgccagaagggctgccatggtggttcacacctgtaatcccggcaatttgggaagctggggcgggcggatcacctgaggttaggagttccagaccagactggccaacatggtgaaaccctgtctctattaaaaatacaaaaattagctgggcgtggtggctactcgggaggctgaggcttgaacccagaaggtggaggttgcagtgagcccagatcacgccactgcactccagcctgtgcaacaagagcgaaagaagagcgaaactcttgtctaaaaaaaaaaaaagtcccagaaggtcttggggctgagacatgggcggggctgggggcagccaagtggcctttgaggatggggccaggcaccgcacagggcaggctggtcatgaggcccccacgaaagatcccagcattgggagctcaggcttccccgccccatgccaggtctgggttctggggctggagtgtggagcctcggtgcgcccagggggttcagcctgagggtctgagacttttccagggcagggaatttgacgagggcctgagcactgggctggcccctcaggtgcccacgcctacaactcacttctcaccgggcacgacctctagcaaaggccagtattgccttggcctgtgggggtccccaaggtttcagggagagaggaaaggaccctcaagcttcgtcaacagcgacagcccagggcctggatgggcttccagtggggagggccctgtggcaggggtagggatcatcacatctcagaccaaggccaggacatggccagaaccccgggatcagagggactgatcggggtctgtcagtgacaggaagctgggctgcgacagagagggagagacagcaagagacagagacagagaccgagggagagagacaggagagagagcaagaaacaaagagggacagagagggagacggcgcaagagagagacaagagggagagatagagacagggatagacagagacagagagagaccaagggagacagggacacagtgggagatgggaagagggaaacagagtgtctctgagtgccgggcagatgaggggagggtggcctcccagccttcaggtccagaaagcagcttccagtggccatggctagtgagctgaagtccagggtcccggggcacagctcccctccctgcagcggctgtgcaggacctgaggacctggggggccctccctgccaggcagcccctcctgcttcccttcctttggaaggagcggtgctgggtctgagccccagcccatcttcctcaccggggcagcagggccaagacccacgatccctaggctgagccagcggcacctcagggggcacggcccttgcccacagatgcccaggccggcctggtcttctctgaatacccctaagcctgactcttgggttgtgaatgtccgcgaggttgggggacctgctggccctgtccccacaccgctttcagcctttcatcacccaaccaaagacagaagctcaaacgtgggcaccaaagtctagcggacgcaccgaactccaggctccaagcacatccacccatggtggctttattcagtcacgtccccacgcccacggctccctccaccaggcagacagaggggaggccaccccactgcaaagggtcccagccagtgggcaccaacctcaggaagacgtggtccccacctggagcttccctcggctgccctggcccttgagcccgtcctgaggatttgtgctttgactctgacagggagcagcaggaagctgccagcccactgcctccatgcgggtccttggagggcagacggtggagcggcgcttcctcagctcccgcggtcaggccccatcagggatggtcacagtccagccacaggggcgactctgcccatcagtccccctggggcagcgaccagatcctggctggggcagcaccgggacaggccctctctatgggcctaaggtcaatgcaggtgggggctcgctgggcccaggccaatgaacccacccgtaggagccctcactgggcagcagggccaggagggcaccagggactggccgcagagtccactcggggcaggcgtctgtggcttggaacctgccctcgccaaggcactggggggttaaggagcagatccctcagacggccttgggccagaagctccctggagagctgggcacctcgaggagcgtctgggagcctcaccctgtcccagtggctcctggcacccctgggagcgtcagcaccaccccaaagctgggtgcctgtgtcgccactaaacagaagggaaaccgaggcaggggggccggctggcagtggagcattctggcagcgccgggcgaccaagtcccgactggcagcggctggagtttggttttcagaagcgaaggctggcgttggcacacagggaaggctgcccgatgacgtgcctcgactgtgttacatttactgaaggagagcggcctcctgggcatgccactcaggcacggtgaggctctgtggcaccaccagccgcatggcagggcagagagtggcgccgtcctgcatgccccccacagcagaccagagtcccgtcctcacgctgcacagtgggtgatgtgagtttcaaaactacgcctccagaccgagaaaccctcccagctgtcagcaagccgtggcgccgagctgccgggcacctgctggctgctctccagtctcaaggagctgggacagcgggcatggggaggagctggcctcgagcccaaaggtcgtagggagccaggcagggcccaggagcacccggcacttcccgaagccggactctgtagaggacgagcgtggagggtctttcgggtgggggcagccccagctgtgtgccccgaggccccgggaagtggggacgggccgaggagggagccaggagcacggccttcctcctgggtgtctccaaggctgggcttcgccgccgagcctggttcacgtggggccgaggaccgcgtctgcaggcggctccagcaggcagcacgggctctcggcagggcctctggaaaggacagggagggctggctttagcgactccacgggacggggacgcttgggctcttctagggagatgggaagctcttgggaggcacccgtcatcccaagcacatctgtgttcaccaggcagtccccactgccaggacccgactccagggagcccccgtggccccgcagcacctgccctagacgtgctccatctccgggtccgggtcgggctcctcctcctcctcctcctcgtcttcctcgtcgtcgtcctcagcgcaggccttgtccagcggcgcctccccgtcacgggccagctcctccacgtgcgccagcatgtcggccatcagcgcctcctccagccgcttccgcacctgctgcaccagctcttcctgcttcctggggacacatggaccttgcgttacaccaaggtgagcggccagcaggacatggacacaggatgaacgtggggacctcagctgggaggggaggcccgagggatccacaggcacccccccaggaccagccctggcccgtgccacccctcccttcacaatccacgcagagaatgaccggctgccgctggccatcgccagcgtccgccaccctcccagatggcccccctgccacctctactgggaccaagggaggggcctgacccttcagtccccagacttggccctgagcctccccggggctcagctgtgtaaacccttgctcctgtcccttgac[132 bp omitted]cgaaaccccatctctactaaaaatataaaaattagctgggcgtggtggcggccgcctgtagtcccagctacttgggaggctgaggcaggagaatcacttgaacccgggaggcggaggttgcagtgggctgggatggcgccattgcactccagcatgggcaacagagccagattctgccaaaaaaaaaaaaaaaaaaaaaaaaaaaagcaagcctcaccaaaatcagctaccatcagcccgcagcagcccccaccctcgcaggccgggggtcacctttccgctgcccactatgcaccagcgtgtactcctttaccatggctcgggcggcctgagaaaaagaatccacaccctcgtctcaacccaccaccagggatggggggcctcctcctcggggcctacaagctgatgccaggcactccagggtggccgctcctctgcctgccgcctccggggccgcagcacgtgcttctgcccacctccctctccggctgcccaaagagcccgtctctgttctgctttcagtcccaggcaaagctgactttgtttctccccagttgtggccgaggctcagccgccccctgcctccggggtctctctccagcggctcctgcagacctgagctgctccctctcactctgtccccaccacccggaacaccctggctcacctactcgactgcagccaccacctgctcgtcatctttccagacaggaccctacctcctgcggaacccaccaccgagttcctcatttcaatgcccttttctatttctataagttcttattttatttttttaactctgtcacccaggttgaattgcagtggcaggatctcaactccgcctcccaggctccagtgattctcctgcctcagcctcccgagtacctgggactacaggcatgtgccaaaacacccagctaattattttatttttagtggagacggggt[138 bp omitted]atctgtctgctatttttcacagtcttgttcttttcttttgttgacaattcttcctatttcaccatcttcatttcgggaagttctctgagcgcgcagagagtgtaaatggacctcaaacccaaaagagggggcccagaggtaccacggccggaggaggatgccgccagccgctccggatggaacccttggcgcccacagtttgtgtgcttgtgggggtggcgtctcaggtccatctgttcaccctgtgtgggggcacagggtctcttcttgtgcccaggggcctttaaccccggctgctgccacaggaaacccgcatgcccagcgcctccctggccgttccgggtcttggctccttctttctggaaccgtcaagtttcctttccttcctctgacctaagccgtgtgctgcactgaacgtgaaaggtcccgtcttcgctccagcacttccagagtttcctgcaggcgcctccgtcaccaggcggccttgcgtccactctgcacactggaagtgggttcggccctgaggccccgcaggagggccgctcacccctgggctgctcagcctcacctgactgttgcctgtttctgagcggccgtgttccctgctgttcgttccgaggctctgcacatcagaactgcccctcagcaggcacccagagccatctccctgaaggcagagactcctggcctgccctgtccctccgtctccagggcccaacatggagcccagcacccagcatagccagtcctcacggactcaaaggaccacactcttttcaagaacattcctccaaggggtgcctggctcgccctgaacccaggacgcgggtgaaacggttcatactgctccgacgatgggtccccttgccctggctgtttctgtttcaaaaccccagcagcatcgtggggagacgggaagcacgcaggcacacggggacactcagggtccccacggccacaagagacagggtggagcagcaggggaccaggccaaggggctacctgatgtcctcgtcggtcaccatgaaggctttgcacaggggctgcgtggtgttgagccatacgccggggttcttctccacggcggccgagagctgtcccgtgatgggcatggtgctagtgtgcagggcgctggcgatggccgacagcagcgtctcatccgtgcagccaggtcccacccctgccaggcagtggacaaacagccgcaagtggagaggtcaccacggggcagctgtggcccagacaggccacggaaatgccccaagaatgggagctgccaccttcttggaaggaaccccaacttgggttccatttctaaattccctctcccgcttgtgttactacattcataacagaaaaaaaagcaagttaggccaggcgtggcgactcccgcctgtaatcccagcatcttgggagggcgaggtgggaggactgattgagcttaggagtttgagaccagcctggacaacacagtgagactcctgtctctacaaaataattcaaaaattagccaggtgtcacgctgcatacctgtggtcccagctactcaggaggctgtgctgagagaaccacttgagcccgggaggtagaggctgctgtgagtagtaacggcgccactgtacttcagcatgggccacggagaggctgccttttgtttttgagatggggtcttgctctgtatcttttttttttttttttgagacggagtctccctctgttgcccaggagagtgcagtggtgcgatctcggctcactgtaagctccgcctgccaggttcacgctattctcctgcctcagcctcccaagtagctgagactacaggcggccgccactacacccggctaattttttgtatttttagtagagacagggtttcaccatgttagccaggatgatctcgatctcctgacctcatgatccgcccgccttggcctcccagagtgttgggattacaggcgtgagccactgcacctggccttgctctgtattttctgtagagatggggtctcactatgttgtccaagctggtcttaaacttctgagatcaagtgaaactcctgccccagccccgccaagtgctgggattataggtgtgagccactgtacccagccgaccctgtctcaaaaaacaaccaccaaaaccatgcaagagctgcattctttgttctgtggtgtggacgtgctgggagagtacagaagcaaagtcagctgtccttgtttgtttatttaggatctccatggcaaaactgcacgtcctgcaggtgaaaacagccccaggcctgcgccacacctggaagccacaaagccccacccgcagggtctccaaggtcaagaatgaagggcccagcccaagcgcccttacccatccccaaccccactgggtcccctcctcctgccccagtcgctggcagatttgccctaagcacccaaagcaggaacagccatccaccctgccaggagatgagggcacctgcagcacctccaccccacccggcacatccccttccgcctcccctcagggtgcccgctcaccctgcaggcccttggggaggtccatggtcttgaccagctcctcagcaatgtcgaaggcgttcaggccgctcagcttcttctcccagaagagctgccccagacacatatgtgaacctcaagagtggccctgccctctccccactccaggtccttgctgggctccagggaggcccacctggcctccttgccccatgtgggtcccaatggggcatctcccctcccactgccttgggtctccagaccctgcccaggctttccacagccagggatccagtggacgtttgtaaataagaataaaaaatacacatggggtggctcacgcctgtaatcccagcactttaggaggccgaagtgggtggatcacctgaggtcaggagtttgagaccagcctggtcaacatggtgaaaccccttatctactaaaaatacaaaaaaaagtccggtgtggtgacgggcgcctgtaatcccagctacttgggaggctgaggcaggagaatcacttgaacccaggaagtggaggttgcagtgagctgagaccgcaccattgcactacagcctggacaacaagagcaaaactccatctcaaaaaagaaaaaaaaaaaaaaaaattagccgtgcattgtgacgggtacctgaaatcccagctacttgtgaggctgaggtggaaggatcacttgaacccagttgaaaccaggaggcagaggttgtagtgagttaagatcctgccactgcactccagcctgggtgacagagcgagactctgtcacaaaaaaaaaaaaaaaaaaaagaaaaaacaaaaagaaaatacacacggttctcaggtttttaagaagtaggttacacagtcacatatgggcagtcaaccccctgtatctgtgggttccataaccacacacccaaccagcggcagactgaaaatatttggggggaaaaaaaataaataaatacaacaactggccaggtgagttggctcacacctgtaatccccacagttttggaggccaaggtgggaggatcacttgaggccaggagcctgagaccagcctgggcaacatacagaaaccctgtctcgaaagtgaaaaacttaaaaaaatgaataaaacacacacaaggaacgtcacaagcatccacacctcatgagcaagctagaaaatacctgcaggtaacgtgcaaacattagaccatttccattttttaaaaatatttttattttatttttgagaccgggtctcgctctgtcgcccaggcaggagtgcagtggtgtcatctcggctcactgcaacctccacctcccgggttcaagtgattctcctgcctc[221 bp omitted]cagattttggtatctgggggttgagggtggggcgtatcctggcaccaataccctgcacattccaagaggggaccgcaggactgggtcttgctctgcccccaggctggagtgcagtggtgtgatcatagctcactgcagcctcagcctcctgggctcaagcaatcctcccacctcagcctccccagaagctgggaccacaggcgggcgccaccacgtccagctaattttttacttgttttttgcctcgtcatgttgcccaggctagcctggaactcctgcgctcactacgtccgctccacgtacgacctcattccaaacgtccacccaccaaagtgaacaacccggccgggaaggctggggtcgctgtgcgttgagctcacctggcgcggctggtccaccgccttctgcgggtcgctcttgaccttgttgctggggtggttggtaatcttggtcaccggctgcttgaagatggacgccgtctggcgcacgggcagcgccgtgttcaggtcgggcttgccctgcgggaggaaggatatgcagtccggcctgggggcgccccggcggcgcggagcctcagggggtgcggggcccgggtgaccccctgctttgccggcgcccctcgtgtcccccgcgcccgccaggacccccacggtccggggaggccgctcccgcagggtcggtccggccggctctggaacgcccgccgcgggccgcgtcctcgccatgcgccttgcgctctgcaccctgtggcctgcgccttccgctctgtgccctccgcccgctgtgacctcctgcgctcaggacgccgggctgtgtcgcctgcagctcacgtcatggccgcgtccccgcctagaacgccccgcgccgacgtcacctgcgtgacgccaccactcaccttgacctggttggaggagtcgtagcgcacgcgctggcggctcttgttcatcttgctcatcagcatcttgcccgtgcggaagtcgaaggtgctcaggtccatggagccgcccaggtagcgcgccagctgcggcttgctgcggaacttcttcccgctcgggctgcggggaggcgggacggtcggcgccccgggcggaccccagaccccaaacccaggcctcggccgcagacccaaacccagtcccagccccagcttcaggtcgcgaccccagccccagaccccaacacggccctgaccccaaacccaggcaggccctggccccagccccagaccccaaccctggcgtgaccccagaccttcatcccagaccccagcaccccacaactggcccctagatctgggcgccagccagacccagagcactggccccgatcctcacaccctggccctagccccagcctccacatcggatccttgctccagacccccaaccccggtcccctctgaatcctccccaccgtaggccctggcagcgtcaggcacagcagacgctgagttcgggtacaaacgctactacctacagggctttgggccccggctctgggaggatggctcacatgtccagaacattccagacatggaatttaggtcacattcttgagaaaagaccccacggagaacaggtatgtgagggacagccctaaaagcaatcttcttccaccttggggttacagcagcagggccagactgggaaggggtctcgttctaagatctggggccaggccctaacagctgcttgggcataacccgactggagagctcgcaacaaggcagccaggtaaacacagacctgctctcagacacggggctctgctctcagcctgccatggacaagcgccggcaactcatcctctccaggacataaggacacccaccaatgggttgccctgtgtgtcacatgaggtcacactacaggatgacaagcacccaacccaacacaccgtcatcatggttgggatgtaagatggaacagccatgttggaaaagcctgacagctcttcactgagtttccagatgacccggccacgccactcttaggtatctgcccgaaaaatgagcacgcatccacaccatcacttctacacggatgtccccaggagccagaaggtggaagcagcccagacgccttcaatggatgaacggacaaacgcccatccacacgatgggacatactcagccatgaaaaggagcgaggctctgacacaggccacagcgtggatgcaccttgaggacgccacattcagtgagagacgccagacacaaaaggccacacagtgtgtgatcccatttctaagaaatgtctagaacaggataattcagagacaggaaggggacgcgtagtgccagaggctggggtgcaggatgtggagtggctgctgatagggacaggacttcgtttctctctttccttttggagatagggtctcactcttgcccaggctggaatgcaatggctcaatcacagctcactgcaaccttgaactcctgggctagggtgatccttccaccttagtctcccaagtagctaggacgacaggcacaagccaccacgcctaatttttttttttttgagatggagtctcactctgtcgcccaggctggagtgaagtggctcgatcttggctctctgcaacctccacctcccaggttcaagtgattctcctgcctgagcctcctgagtagctgggagtacaggtgcccgccaccacacctggctgatttttgtatttttagtagagaccaggtttcactgtgttggccaggctggtcacgaactcctgacctcaggtgatctgtccgcctcagcctcccaaagtgctgggattacaggtgtgagtcaccgtgcccggcctaattttttttttttttaagacggagtctcgctctgtcacccaggctagagtgcagtggtgcgatcttggctcactgcaacctccgacttccgggttcacaccattctcctgactcagcctcccgagtagctgggactacagctgcccaccaccacgcccggctaattttttatatttttagtagaggtggggtttcaca[140 bp omitted]acccaggctggtctggaactcctgagctcaagcagtcctcccatcttccctcccaaagctttgggattaaaggtgagtcatcacgccctgctgcttcatttcttttttttttcatttttacttttagatccagggtctccttgtgtcgcccaggctggagtgcagtggtgtgatcacagcacactgcagccttgacctcctggactcaagggattgtcctgccttggcctcctgaggagctaggactacacgtgtgcaccaccatgcccagctaatttttaaattttttgcatagatggggactcgctatgttgcccaggttggtctccaacttacgatctcaagagatcctcctgcctcgacctcccaaagggattataggcggcagccactatgcctggctggtgtcttttatcttgataaaatcatttagaaataatagcacttgtatggtgcttactaggccaggtacctcaaacatattatgtctacaaactcagtcaacagtcacttttattaataatgcatcagcctgagattggtgggtagctctgttttgctgttttcccgttttcccagaatcctctagggcagtctcctcctgtcctcttctgcccctgccccagacgtcctggcccatggcagatgccagatgtcagacaactgagacagctcagaagaatctcccatagccagaaggaaactcaattctgcaggcactgcacagaaatgcttggtcccatgcttagctcaatcgcctctatccaggatctatgtactgggccgatacatagatcacaggaagttttatttctctccacccctgccccccaaccccgggcaaattccatggtccacaaggacacgggcaggctccagcatgtccagtaggacaggacgcctcagggagggcacgaggacaagtgcctgggggtctgaaaccactgagggctcttcccggagatttacttttgagacttaactcttttaattactctctggactggctgacgttcagtcgaagctggtttgcccagggcagtggaaagaaaccaagaaaccagaggctgagactcaggcttcatgtagccacaaggaaggaagaagagaccccacaaaacactcccaacagctctttgcctccggtcaccccaaagagaggccgttctgccttttaagatgaagggaaacaaggccgggcgcggtggctcacgcctgtaatcacagcactttgggaggctgaggtgggtggattgcctgagctcaggagttcgagaccagcctgggcaacatggtgaaacccgtttctactaaaatacaaaaaattggccgggcacagtggcacgtgcctatagtcccagctactcgggaggctgacgcagaattgggttgaacccaggaggcagaggttgcagtgagccgagatcatgacactgcactccagcctgggcgacagagcaagactgtgtctccaaaaaaaaaaaaaaaaaaaaaaggtgtaaggcgaacaagagacacacacagaccacagcctggttgttaagactgggggtgggcgcacaaggcagtggtaaatgggcctggggttctttctagggtgatggaaattctaaaattgaatctgaggatagctgcctatatccgtaaatatgtgaatatgctgaaaaaccattgactcgtgcactttaaatgactgtattgtatggtacataaaactgtatctcgataacaccttctcaaaaagaataaatgcagtggctcacacctgtaatcccagcactttgggaagcaaaggagggccaatcacctgagatcaggagttcgagaccagcctgaccaacatggtgaaaccccatctcgactaaaaatacaaaagtagccgggcgtggtggcacatgcctgtaatcccagctagctgggaggccgaggcaggagaattgcttgaactcaggaggtggaggtcgcagtgagcccagattgcagcattgcactgcaacattgcactctagcctgggcaacaagaacgaaactcggtctcaaaaaaaaaaaaaaaaaaaaaaaagaaggcaggcgcagtggctttcatctgtaatcccagcactttgggaggccaaggagggcagatcacctgaggtcaggagttcaagaccagcctggccaacatggtgaaaccccgtctctattaaaaatataaaaattagctgggggttgtggtgggggcctgtaatcccagctactcaggagtctgaggcaggagaatcgcttgaactcaggaggtggaggctgcagtcagccgagattgcaccactgcattccaccctgggtgacaaagcgggactacttctcaaaataaataaataataatgaacataaaaaattagctgggcatggtggcacatgcctgtagtcccagctatgctggaggcttaggaggcaggatcgcttgagcccaggaggtcaaggaatgcagtgagctgtgactgcaccactgcactccagcctgggtgacagaacaagaccctgtctcacaatgaataaatgaatgaatgaatgcaaatgcaagatagagggggttagtggttaccaggggctgggggagtaacaagtggggagtgactgctaatgaggacagagctgcttttcagggtgatgagaatgttctggaattagatagcggtgatggttgcacaactttgtcaatgtactaaaaaccactgggggccgggtgtggtggctcaggcctgtaatcccagcactttgggaggctgaggtgctggggtcaggagttcgagaccagtctggccaacatggcgaaaccccttctctactaaaaatacaaaaattagccgggcatggtggcagacgcctgtaatcccagctactcgggaggctgaggcagaagaatcgcttgaacccgggaggtggaggttgcagtgggctgggattgcgtcactgcactgtggcctgggccaagagtgaaactccatctccaaaaaaaaaccccactgaattgtacatttctaaaaagtggctttggccaggcagtggctcatgcctgtaatcccagcactttgggaggctgaggcgggttaactgcttgagtccaggaattcgagaccagtctagtctaggcaacacagcaaaaccccatctctataaaaataagccaggtatggtggcacgtgcctgtaattcccactacttgggaggctgagctgagagggtcgcctgagcctgggaggtcaagaatgcgtaagccgtgattgtaccactgcactccagcctgggtgagaccctgtctcaaagaaaaaaaacaaaaaaggtagcttttgtggaatgtgaattatatctcaattttaaataaaggttatgcccatctattgacacaaaatgatgtccctgagattttattcaatgaaaaaagaacagccttgataaaaccacacgtatagaaaaaagtgggcaacatggcctgaactctccccaggcacccccaacagaaaacgcagtctgggagcctgcagcctcagatgaagggctgggttgaggccccagacctgcagagggcggctctgggctgcctggcttcaccctctgcagagaaacctgaaatctctagcctgtagaggagcttctccctgcttttctccactgctagaccctcatgctcagggccagggcccagagtgggaatgagagaggtggggtgatgacagcctcaggatactccgctcaagctggccttggttctagctcccaagctgcagccacctcttagggggttcctgctgcctggacgcctctccctgtcactcaatgtcacgtcctcagagaagccctccctgaccccagtctcattcaggccccgtcatctgccctcccagatttcagcatgtgtcactgcagatctcaggacgtgtacagggttccagctcataagggtacacatttggggaccaagtttcccctctcttgctgtcctccaactttccaggaaccagtccctgagctcctcctgcaggacgaggccccacacattgcttctgatcacagccatcctttccccgctcacttttctcactttatctccccaaaccgggacagtcaagaaccacagaggaccgaagtgcacagtggacggagcggtcgttctgcccctccttggctcgtggaaaccacccgccctcacctgggcggtctcctgcccacgaccccgagctgtgggaaaaagggggaccagccgcacacccccctttacccaggtgctcggcacatggcaggcgtcctccgctttcccctcctgggggacctgaaggcgccacgggacactgaaccaaggggagggcgcaatcaaagctggcccagaatcaaaagcatctttcccgagccaggaaaaaaaaaaaaaagaggacaaacagcaggtggccgactgtctgggacttggctgcagcaggcgactaagtctttgttccacggagggggttccctgcgacctttcagagcagcgccttgttccaatttggggacgggggggtctctgaaagccttccaccaccagtaacatccacgcaaagactaccgttaggtgggctcggaaagtcgaaagcctcaggtctccaccctgagggggccacgacccaagaggaccagaggcctcggaaggagtcaaggggaatacctttaaaaaaagcaacgctgcgtgggagaccagtcaccctgaggcgcttattcccaggactggggcgagcccaagaacccgtattttcacgcacgccctccccgatccgcccatgagccctgctccccgaaatcccggctggccaccccctcgggctccgcgccaccccaggagcgccccaagaaggcaccccctgcgtctcacgggaaccaaagggacagcccaccctccacccctgccccccggtagcatctggccgccgccaggcgcccctggcccagcgcgcacgaacaaaggccgcagtcgccgtccggcagccagtccctgaacggccggccgaaagccatgcggcccaacaagcggcgcacgcgcactgggcctccgcgcgccgggcgcacacgcacgcaagacgcacgcacgcacgcacgacgcacgcgcggggcccaggccgcggcccggggcaggggcgccgaggccgccgcagaggccgctgggaggagcccgttgaggccctgcgcggccggcgcgctcattcacctatagtaaaagacatccctgtggccggccgacagccccgaccttctgggcacttcttccctctcccagccctgcgggagcgccgggcactcccacctcttccgctccattgcgcccggctcctcggcccgccgccgggcccgccgccgccgcccggacccccactcgccgccgccgcctcagctgcctccgctgccgctgccgccgccgccacttgccgcggctgttccggcccgcgggcccccgccctccgcccccagccgggcgcgcgccggctttgccgccctttcggccccctccccgcgctcgccagcccccgctcggggggcccgctccgcccacccgcccgcgcggggccccgcgctgcgcagccgcggcgccatgcccccgcccctctacggccccgccaatcagcgcgctgggagggggcggggccttaagtggcgtgcgcgcctgcgcgctgtgccttgcgagctgccagtgcccagcagctgtgcccggagtccgcgcggctccttttactgtgccctgtctctgccggccgcctggtgcgcgtgcgcggggacatgctttcggactagtggggtcctttcctccgacctttctccagcccaagtcttggggactctggcccagtgactggacctcgacttccccgccctcctggtctcccagcttccgagctttttacgagcgtccaaatctgggggacttcccccgtgaccaccccttccacgcccccaagttccctccagtagcttttttttttttgagacggggtctctgtcacccaggctggagtgcagaggcgcgatcttggctcactgtagcctccgcctcccgggttcaagttgttatgcctcagcctcccaagtagctggttccacggacggctaatttttgtagttttagtagagacgggatttcaccatgttggccaggctggactcgaactccttacttcaggtgatcagcccacttcggcctcccaaagcgctgggattacaggcgtgagccactgcgccccgtccagctgctttttgaaccctcaaaatccaggaatctgagcacccccccccagctccccgaccaccccctgcaccttagtccagccaccatctctggccgggagagttccaggaccttcctgcggaatcgcccaccccctgttgtctccccttaaccccttccccagccagccagagggatcctgaaatggaaacgggtgggctgccccccatcagttccccctgacagcgtcgctcccaaggctagggctgggcgggcctgcacaggtgttcaaggactgagtctagctgctgtgctcccctgcctccagctggagaaactgtcctggttctaaggactcttttgttgacattgggtccacccgatctgggatgctttcccatctgaagatctcgtcccattttcaaagtccctttagctgcaggttccagggagtaggacaggcacattcatttattgattgattgactgactgatggagacagagtcttgctctgttgcccaggctcgagtgcaatggcgtgatctcggctcactgcaacctccacctcccgggttcaagtaattctcctgcctcagcctcccaagtagctgggactacaggcgcccaccaccatgcccggctaatttttttgaatttttagaagagatgggatttgaccttgttggccagctggtttcgaactcctgacctcaagtgatccgcccacctcggcctccctaagtgctggggttccaggtgtgagccacagcggccgacggaacgggcacattttcgggatgttgtgctgaccacagaagcactgaataaatcaggatggatgggtggatgatggtcggatgccccgctcaccccacctcgtcgtgaggtgaggtgaggtgtgagacagccagctctgtctcccgagaagctcaggagctggttactggcctgagaccgaggccccatggcattgggctgccatggaagaatcagtgctcccaaggagacaggaaagtctatgctgtggactcaaagccaggcagttacaccccagaaccagccgtggtacctgactagggcagccagagcaaggcctgcccccatgcaagggagatgataattatgttttgagacagggtttcactttgttgcctaggctggagtgcagtggcgtgatcttggctcactgtaacctcctgagctcaagcaatgtgcctgcctcagcctcccaaagtgctgggatcacaggcgccagccaccacgcccggctgggagattattattatttttttaatttaattatttgtgttttttttgagacggagtttcgctcttgttgctcaggctggagtgcagcggcgcgatctcggctcactgcagcctccgcctcccgagttcaagcgattctcctgcctcagccttccaagtagctgggattacttgactagggcagccagtgcaaggcctgcccccatgcaagggagatgattattatggtggcacccgccaccatgcccggctaattttgtatttttagtggagacggggtttctccatgttggtcaggctggtctcaaactcccgacctcaggtgatccgcctgccttggcctcccagagtcctgggattataggcgtgagccaccgcgcccggccaagattatttttaaaattgggctatgattgtgacaatgcactccagcctgggtggtagagcgagaccttgtctaaaataagtaagtcaataaaatagtctttaaaatggccaattccaggctgggcgcagtggctgcataccagtgtgaatgtattaaagcactgcattgcacacctgaaaatggttaattttatgttatgtgaatttcacctcaataacaaaaaaagtgacccgggacatatcatgtgcacacaggagcccatttggaaggggtcacgatggccaaacagagaggacaacttgagcaacaaaattaaagtttataaaggatttatagtctgtagaaaaaatgtcatcaaggccgggtgtggtggctcatgcctgtaatcccagcactttgggaggccaaggcgggtggatcatgaggtcaggagatagagaccatcctggctaacacggtgaaaccccgtgtctactaaaaaatacaaaaaattagctgggcttggtggcgggcgcctgtagtcccagctactcgggaggc[135 bp omitted]gagtggatgctggtagaaataaatgactgaataaatggctgatgggaccacgagactgctcctctttacagtggagtccagtgactcactgtggcaacaaacacaggaccccatccgccagtctggctcctgtcacctcctgggctggcgagggcctcagtgccaccatgctgaagtctctgccttccctttcgggacttaagtaccaggacagcagatacagaaataggcaggggaagctcactgctactggggtctggtaacctacagattcagggctcaagtcacacaatttcttttttgagacagggtctcactctgccacccagtctggagtgcagtggcacaatcacggctcaccacagcctcaaacttctgggctccagcaatcctctcactgtggcctcccaaagtactgggattacaggtgtgggccactacacttagcctgcagacaatttttttttttaaatttttatatattttttgagacagagtctggctctgtcacccagactggagtgcagtggtgcgtgagccaccacgcacagacccctggccaatgtttttttaaaaatcagaacaaaatctggccgggcacagtggctcccgcctgtaatcccagcactttgggaggctgaggtgggcagatcacctgaggtcatttcaagactagcctggccaacatggcaaaaccccatctctactaaaaatacaaaaattagcagggcgtggtggcaggcacctgtaatcccagctactcgggaggctgaggcagaagaatcgcttgaaccctgaaggcagaggttgcagtgagccaagatcatgccactgcactccaacctgggtgacacagtaagattccatctccaaaaataaataaataaataggcttggtgcagtggctcacagctgttaatcccagcactttgggaggctgaggcaggagaatcgcttgaacccaggaggcggaggttgcagtgagccaagagcgtgccacggcactccagcctgggcgatagagcaagactgtcttttaaaaaagaataagtaaaataaatttctgttggttgagccatgcaaaatctgtggtattttgttatggcagccctagcagactgatataatagctatttccatcaacacacttatgtatgcagacagtatgtctaggatttttttttttttttgagtctcactctgttgcccaagctagagtgcagtggtgcaatgtcggctcagagattggcaagagctggaaaaaactgggcagctgtatcagggagtgtgactttgtaccatattctctttttatacctgttcatttttattttttcattttttttctttttatcagagacaggggcctctttgttgcccaggttagtactgaactcctggttcaagtgatgccccttcctcagcctcccaaagtgttgggattgtaggctgagccaccactcccagcctgttcatttttgtatccctaatgtgacagtttgaaatgtctaccaattctgatattcttcccttcaaaacacagaacctcattctcctccctctgcacgtgggctgggcctggggggcttgcttttgataaacaggctgtggcggaagtgatcacgtgagacttctcagggtggctcatagaagcactgtggcttgctccttcctctcccttggttcacctgctctggggaaggcagaggccatgccgtgaggatgctcaagcagcttcgtgtaggggcccccatgggaaggaactgtggctgtcaccgacagccacgtgagggcactggcttggaagtggctccagccccagttgagccttcctcagacgaagtggccttggctgatgtcttaactgcaacctcatgagagactctgggccacaaccacccagatacatcactcccaaatccccgactgacacagactgtgagagagtgaatgttcgttgctttaagccactacgtgtgggtgacttgttaaggcagcaacggatgaacacactgcagatactacttatgagccatttcaaataggcagtttctgtcagccattggaacactctcctagacttgcaacattctggagctgaaaggacgcctgggtcacctgtgccactccagctacagtcacagtaaccaagccaccagcatgatcaacatccgggcacggagcaggtttcagtgaggtttaatgcaacgtgcattaaaatatccaagctgttttcagaaacataagaagcctgaagctgagctgtgggtttcctcttgtccatcctgaggcttgggctgctccagatgcagcaggtgctgaggtgggaggagctagcaccaccaggcacctggagggagagcagacgaggc[131 bp omitted]accccatctctgctaaaaatacagaattagcctggtgtggtggcagatgcctgtaatcccagctccttgggaggctgaggcaggagaatcgcttgaacccgggaggtggaggttgcagtgcgccaagatcgcgtcattgcgctccagcctgggcaacaagagccaaactctgtctcaaaaaaaaaaaaaaaaattagctgcgtgtagtggtgggcacctgtagtcccagctacttgggaggctgaggcacaagaatcgcttgaacctggaaggcagagggtgcagtgagctgagatcgcgccaccgtattccagtctggcaacagagcgagactccgtctcaaaaaaaaagaaacgtcccttccatatgaagctggctgcggaagtggcccaggacagcagcctggcaggaacaccaatgcagcacaggccccgggctccacgcagtagggagaaacacagaccggagcagggctctgaggcccaggttcaaacagtggcatggcctcaggcctcaggccagcacctggaaaatgggggtgtaagagcacggccacgtgggactgtcatgtgggcactgggaagatgccacaggcactgtggttaagggggcagctggcatgctggagaaacacgtggatgcgtccagggcctcacaggcgcttccaagagctcatggggtgtccagccactgtgggccagcctccaccttccccctctgtctgtaacatgggccccacccagttcaggctgcagtgcccactgagacggaagcaaggtttgcctcaaagactcactgggattgtccagagggagggcgaggcccacaccccaatcacacaacccaaggctgcggggcggacagttctgtgcccgtgggccggagatgccagaaggggcacccagggccccactctcgaatgcaggtctctccagggggagcagtgagggctgccgccccggctctgggagcctggagaacccactcttcggccaccatccggccatcatgcagtccacccaccgcagcccactgaaacttaccagagcagtctgtgaagggtttgtgtaattaattatccttcttaaacttgccattgatgtaaggtacccagtccaggatcagccgccaatcggtggcccacaccagccccacggcgcccacagcgccccatgtgtaggccgtcgggaccctgcgagaggagaggggatggtcaggcctgctctggaccctttctccaagaccctctcctgcccaccccggccccccgtcctgagcggtgatggctgaggtgcgggcctggcacctgtgcccgcccagtgctgtgagccctgagggctggcaccagcagcacaggccctgcccatgctgccggctctcaggaagccagtaactgctcaaggggctgctggggtgggagtggagctggggggaggctgggcctggcgcatgtgtaggtgtttgtaagtttgcaaccaccatgatgatgggtccggtctgctgcagtctgcagaaattcatccatccctgccacagctgcaggactcaggcaggtgccgccatcacagtccctgttcccaggcgaggacaccaaacaacagacagggcgaggccctcacctgaggccacacagctggcgaggatcgaggcctccggttccaagctcatgctcttgcccaccacggcacgtgctgtgagagctcccctgagttgcctgggcccagcagattctaggaaggcccagcagattctaggaaggcccagcagattctaggaaggcccagcaaacccgcctgctggcgtttacgccctcgcacagtatgaacttgggcacaggcttctttttttttttttttttttttttgagacggagtcttgctctgtcaccaagctggagtgcagtggcgtgatctcggctcactgcaatctccacctcccgggttcaagcaattctcctgcctcagcctcccgagtagctgggactacaggcgcccgtcactgcgcctggctaattttttgcatttttagtagagatggg[148 bp omitted]ggcatcactgccgaggtcaagtgacaaaagactggcttcagacatggaggctcacaaggggaatcccagcactttgggaggttgaggcaggaggctcacttgagcctaggagtttgagaccagcctagacaacagagtgagaccccatctctacacaaaattaagaaaaattagccgggtgtggtggcacatgccagtagtctcagctactaggaaagctggggcaggaggatctcttgagcccaggaagcagaggctgtggctacaccaactgccttccagcctcggtaaa[131 bp omitted]gggaaacatggtgaaaccccatctctactaaaaatacaaaaattagccgggcatggtggtgggtgcctgtaatcccagctacttgggaggctgaggcgggagaatggcttgaacccaggaggtggaggttgcagtgagccaagattgcaccattgctctctagcctgggtgacaaagtgagactccgtctcaaaaaaaagaaaaagactggcttccatcctgggcacctttgtgcaacctctagctgcctctggagaagccagctgccatgctgtgagatgccctatgaagggacccatgtgg[136 bp omitted]atggtaaaaccccattctactaaaaatataaaaaattagccaggcaaggtggcgggcgcctgtagtcccagctacttgggaggctgaggcaggagaatggcatgaacccgggaggcggagcttgcagtgagcttagatcatgccattgtactccagcctggtgacagagcgagacaccgtctcaaaaaaaaaaaaaaaaaggaagaaataaatgaatccagccaacaaccccgtgagtgatcgtggaaacggatctgcctggtcacaccctcggatgagactgcagcctcacaagagagcctgaggagttgactcagtgcacccactgaaactgtgagataagcagcatttgctagtttaagcggctaattttgggagaccatttcttatgcacacagcactagataacaattgcaggtcccactgctggccaacagagggctgaaattaaaatccaattccgggcggggtgcggcggttcacacctgtaatcccagcacttccggaggccgaggcgggtggatcacctgaggtcaggaattctagaccagcctggccaacatggtgaaacctcatctctactaaaaatataaaaactagcccggtgtggtggtgcgcacctgtagtcccagctactggggaggctgaggcaggagaatcacttgaactctgtaggtcgaggttgcagtgagccgagatcgtgccactgcactctagcttgggcgacagtgagactctgtctcggaagaaaaaaaaaaatccgattcacctccctggatcacagcaaatcacacagctgggatgttggggcggtagggggtgctcctcctggaggcggatgaagaaaccctgcccacattgccccaaggggcctcaccagagactctccaagtgtaggccaggtgcccgctcaccagctgggggcacgcacagctgctcctggaacctggctcggaggcagatgccaccaacagggcaggaatcttcgcacgtgttgtcttgatggcattctggataagttatttatttatttatttatttattatttattttgagatagaatctcgctctgtcacccaggctggagtgcaatgacgcaatctcagctcacggcaacccccgcctcccaggttcaagtgattctcttgtctcagcctcccatgaagctgggattacaggtgtccactaccgcgcccgactaatttttgtatttttagtagagacagggtttcaccttgttggccaggctcttctcgaactcctgacctcaagggatccacccacctcagcctctcaaggttctgggattacacgcgtgagccactgcgcccagccctgggttattaatcaccagagaagcctgctcataaatatgcccagtgggccggcctccgcctcccctatcatcctggtcaccccatgtaggaccctgtggatttggacagtgtgggaagagcccacaaaacctgatttccactagccactgaggaaggacgtacagaccatgaccacactgaccaacgacctcgtcgccacgacaaccccttcctcaaagcaagccccagcagggcctagaaggggtgtggactgcagggtccccagctggtgaactgtggccctctcagtcctaagtctgagactctgagacacaaccccacagtgcctcctggggatgagacccgctccctagcctcccaaagccactgcctggtggcacagccctgcacggcccctcgcacgcacgtgtctgcaccccttcctctcccgcttcgttattttaggtcagccccacaccacaggtctcgtttctttacctttccttgcccaccaaccagaatgtccgcccacaagggttcggtctattggcgcgtccctaacacatagtaggtgctcaataaatgttgggctgggcgcagtggctcatgcctgtaatcccagaactttgggaggccgaggcaggtggatcacgaggtcagaagatcgtgaccatcctggctaacacggtgaaaccccatctccactaaaaaatacaaaaaaaattagccgggcgtggtggcgggcgcctgtagtcccagctacttatgggaggctgaggcaggagaatggcgtgaacccgggaggcggagcttgcagtgagccgagattgcgccactgcactccagccggggcgacagagcaagactccgtctctaaataaataaatgaataaataaataaataaatgcttgctgttggatgaaagcacggatgacgggtggtccccgctgtgactgaacacagaagaagcagacctgctgcacccgggaggggctgcactggctaccatgggccactgggttctcagctaggagcaggcttcctcatcccaggcctgagttacccacgctgtaaaacgccaccggcaccatcacattccacttgaaggtcccagtcagctccaccgtgcagaccctgtccccgacctgtcccccagtctgggatagaggaagtatgttctggcttccggagacactgccaatcataagcctttgcttttttcttttttagaaacggagtttcgctcttgttgcccaggctggaatgcaatggcacaatctcagctcaccacaacctccacctcccgggtttgagcgattctcctgcctcagcctcccaagtagctgggattacaggcacgcgccaccatacttggctaattttgtattttcagtagagacggggtttctccatgttggtcaggttggtctcaaactcctgacctcgggtgattcgcccgccttggcctcccaaagtgttgggattacaggcgtgagtcactgcgcccagcagctctaaatttttttgtagagataaggtcttgctgtgttgcccaggctggtctcaaattcccaggctcaaacgatcctcccaccttagcctccccagtagctgggactacagacaggtgccaccatgccctgataattttttgttttgtagagatggggtttcattgtgttgtccaggatggtcttgaactcccaggctcaagtgattctcctgcctgggcctcccaaagcactgggatcacaggccggagccactgcacccggctaagaccttgctgctttttttttcttttctctttttgggacacagtctcattctgtcacccaggctggagtgcaatggcgcaatctcagctcactgcaacctcctcctcccgggttcaagcgattctccttcctcagcctcccgagtagctgggattagaggcacccgccaccacgcctggctaatttttgcatttttagtagagacgcgggtttcaccacgttggccaggctggtctcgaactcctgacctcaggtgatccacctgcctcggcctcacaaagcgctgggatcacaggcgggagccaccgcacccagccaggccttgcttcttagcaccccacgtggaaacaccagacaaccctacggaggccacccccagcccggcttctatgggggccacccctatgccgtcccgctgcccacgtgggctcaggcgcagctgaagctttcacgctccttgttaaaaatcataaaaaccaaaatagtggcaaaggccgaagatgccgcgagtgctgggctggggatcgggactcggcaccttctgggcgcttccgtccagggggtcaccattcggatcccccggtagagatggggaaactgaggcttggagcggcctagccgcggagccgggcatgctggggtttggccttgggtccgtcacgtcccgttcacgccgggacgcgccgctccgcctctcggcctcagtttccccctctgtcaccgggaacaacaagggacctgggcccggcccggcccggcccccggaaacgcgcacaaatacggaacgcagcggcgcggggctgggccgaggcgggagcgcggatggggccgcgggtcggcgtcctcaccagttcttgaccagctcccggtagcgtgggcccaggaaccgggtcaccatcgcggcggagtcgcaccctcaggatgaccctgtccagctgacccggctacactgcgcaggcgcggccgcggcgcgcacgcgcgcggggagggcggggggggggggaggaaaaaaaaacatcatccgccactgtgcgcgcagacccggaagccacttacagtaacttccggcgagggttggacgaccgcggagaagtggtccggagtgggcggcgttagggcggtgctttctggccacgtggtctggcggccgattgtgcttctgggctccgcggggctacctgccagtgattttgtgcgcctagtatgtgccagaacgttatttacaatgaaggaaactgaggtccagcggggaagggtcttgctcagagtcacacagaggggaagagctgggattggagcccacttttggaggcgtcaggcgttgttcctgattcgctgtaggactttggtcgagcggcagtgcttccctgagcctcagcgttgcccgttgcttggaggccctgtcggaaatctctttgcaggattccgtttgcgagcctgggttattcctcattccggcagcagagggtggcctggctccttgctcggtgaacgtctctggatgctcttagctgatgacaggcaggtctttctgcctcctgctttccaccgcaccaggctcgcttgggctcgcctttctccagtccctgcttcctctgctctcccacaacccggcgcagcaccgtacatgctcactcagctcccagcttccagcctcccccctgcacaccgggccggtgtgggcagaaggaagaggggcatattcccagacaccgccattgcacttttgtgccttttcccccatattcaagagttgcctccctcaggaagccctcctggactgcctgacccacaggcacctttacagcatgaacggaaaggccatagcctagacggggcactgggcgtgatttgtctctcgggcgccagcgtcacttgcaggcctcgtgataaggaatggacaccgtgggttcttctgcccagcctggcctgtcctcctggggtcagcccctcagtacaccccaagcctgcagctctctggggactgcgggtgctaacccatccctatccctggttaaggactcagggtgggagccggaaataggttttggacaccacagtctgggcactgtttttctttctttttttttttgagacggagtctcgctctgtggcccaggctggagtgcaatgacacgatctcggctcactgcaacctccgcttcccgggttcaagcttctcctgcctcagcctcccaagtagctgggactacaggcgtgagccaccacacctggctagtttttgtatttttagtagagatggggtttggccatgttggccaggcttgtcttgaattcctgacctcaagtgatccgcctcccaaaatgctgggattacaggtgtaagccaccgggcccggccctgggcattgtttgtagaactttccagttggcttggggtttttgagcttgggatcagagagcacctgaataagactcttcccattggtggaaacttaaaaaagtgggatgcaggggctgacacagagactattaagagaaaggacaggaacacaagggctgctggaatgtcagcccagagtttccagatgccacaatgtaagagttcaccagtggccgggcacggtggctcacgcctataatcccagcactttgggaggttgaggcgggcagatcacctgagactgggagttcgagaccagcgtgaccaacatggagaaaccccatctctactaaaaatacaaaattaaccggacatggtgacggatgcctgtaattccagctactcgggaggctgaggcaggaaaattgcttgaaaacccgggaggcagaggttgcggtgagccgagatcacgccattgcactgcagcctgggcaacaagagtgaaactccgtctcaaaacaaacagacaaaaaaaagagttcatcagagacagtgacataaacaagagctgagagatggagagagatttgtaatgacacctggatccagctgtgcctgaagccattcaacatgacatagaacttcctttttgtttcttgagccggtttttgttattttgttggaccatctggatgtcccctccaccctttttttttgaaacggagtcttgctgtcgcccaggctgcaggctggagtgtagtggtatgatcttggctcactgcaagc[207 bp omitted]cctggcccaccctttttttttgacaggttctggctctgttgcccaggctggagtgcagtggtgcaatcacagttcactgccacctcaagcgatcctcccacctgaacctcctaagtagctgggactacaagtgtgtgtcaccaggtacaaccaatttaattttgattttttgagacagtctcgctctgtcgcccaggctagagtgcagtggtgcaatctcagctcactgcaatccctgcctcctgggttcaagctattctcctgcctcagcctcccaaatagctgggattacaggcttgcgccaccatgcccggctaatttttgtatttttagtagagatgggatttcgccatgttggccaggccggtctcgaactcctgacctcaagtgatccacccgccacagcctcccaaagtgctgggatgacaggcgttagccaccgcgcccggccaatgtatattttaaaagttgttttccagcatgaatttagaggccagctgggtagagtggtggacagggctccctcagcaccttctgtcaactcctggccactctctttcccttaaaaattatagacatggggtctcactatgttgcccaggctggactggaactcctggcctcaggcgatcctcccgcctcagccacctgaagtgctgggattacagatatgagtcactgtgctgagccttctcctccctaaggcacttgtgtgccaaagggctctctcctgggggccaccccccgtcaagtggccaggaaggcactccttccaccccaaccctgtaggggagcagggcagtccagctgtgtcctcgcagagatgcagcggccaagtccctgggcacagcagcagatgcctgccagtgggcactttgggatgagcagcgcccccacaggtcctgccacaccccttccccccgagagctctgtccgtgggttccgtgggcatccggttgtggaggaagtcacagatgccgcactaaggagtgtggggttgacgctgccagcaacggagccgtggaaggtttcagaggagcagtgacagactcagacttcgagccgacttcggagcaggaaggggcagggaagtgggttccaacagcccgggggggggacgttgggagatggggagccctcccagatgggggctgggaggaccgcaggtcctggatggttcctacgcgcccaagtgcagcccccagggagctgcttttccccgggagccaatcctgcttccaggtggcctggagccctgagtacacatgcaggttcccagccgccctgggagccatgggctcctcagagtgaggagtcgcttcgaggaagcccagtgcacagggtggaccacggtccttgctgcacccgaggtgaacgtcagggcccccccccacttcccttcctaaacatgtgacaccagaaagaacccggggactgcagggcatcgttataaaatgtcacgtttattgctacagtgctgttatatacaggacaggtctctgaatccacctgaaagagggtcgttttaaagtcccaatcatccagccagctgtgttgacacgtatacaattattttctttaaaaaaatttttttgaaaaccatcttgaggcactcagatcacaccccccaccccccataattgtggttcccaggaactgctgtttcttcctcctcgcgctgggtgaatctcgtttgaattctatgcagaacgcacagttccagaggctatggggccactgcccacccagacctaggggcagggccaggagcaaaacaagagggagaggcaagttcccttaagagatcaaactcccagggcgtaggggaagccaccgagaagggagaggcagccggacagcccctcccctccgcctggcctggactgggggcagataccaggcattgagctggccttgaggtttcccttgcatctaccatggggcccaggctcccaagccagtctggggaggggagtcaggcagtccaggatctcctgggggtaacggtgggagtctcaggagtggcacggggggagacgcccgacctgcagcggggatgaacacagccagcccaggggtccacaaggcctcaatgcagggaggggcatgaagggcacatgaaggcccccagctagccaggcccacacctgggtgccacagtgaccactgccctagttcgtgtggaactggatgggatcccagggtaggagacttgcagttttaaacccaagacagtccccagccagctgggaagagctggttaccctcatggcaaaagaccagaaaaggagacctggagagaggcctgggtgctgggacatgggacacagatgggcccgaggggacaccctgctggttctgcagcagggtcggacgcacagcccaaggccttcgtggggctcagaccagcacagtcccccggctccagccactcttgcccttggaccacacagagggagggcagcaggtgtggccccaggcccagggatgctccccagcattgggggaggctggccaggcccctggcatcctgtctacgtcacgatggccctctggtgtaatggggacatggtggggtggggtggggggtgtcctgtgctggctcctgagcagcatcctctcagccagagttcagagcatgagcctgggtccctggggcaaaggagtgaaggacagggtgtccaggaggtccccagcaccgggctccagggtgtggtccccatgccaggggtcactggtcccaacaaaatgccccatttcagagagctgtgcaggttccaagggagagcagcttaggggggcctggggagggcgttgtgtagggtagccctgggggccacagctgcttggcagagtcacctgggagggtcagagccaccttgctgacgtcccttcccccaagcccaggtcagtccccttcctgaggggagaggatgcggcagggaagccccaaggtgccttcatcagggaacgcccacgcatcactttccacatgacaaaaccaagagaacccccaacatcaaaaaaacaaaagacccgccgcctgtccccgttctgtctgtgtgcagtggcttccggggggggggggggacgggggggctcaggtttacacggggtctttttaatacaacgtttaatcatctggttgatcaagaaatgcaatgctcagtctaggaacagcagcagaaatagcgagagacacgggacttttatacaaaaaaatttgttgcttacaaaacatatgcaaaaaaagcttaaaaaaaccagagaccaaaggcagcatccttgctaattttcatctacattaagaaaaaaaaaatcttgtaactaatgtttttattttccttaaaaaaaatatttcgcttaggcacaatttgctggtggctttagaagaataagccaggtttccacagcatcccccttgagtgatatgtttccatttctccgctttttatagttaaggcatttttttcttctctgacaaagtgtatgttttgttgcttgctttcaggttttgtttactggaaaaaaaaaaaatgctcctgtcagcccaggcaacagggccaagatgcagtttcaggatccatgggacaggtcacagagtgacacggtggctgagattcggggacagggggagcgaggccagtgagtggtaggccagggccccagggagctcctggacccagtgtcaccttggccgcccccatcactccgaaccttgtcaggttggtgttggctcgatgctgacaacaggtgtgtgaggtgtggatgtggatgaagcccggggtctcgagtggccgttctggggccagagcacagggctgaaagcgggtggctcgtcccacggaggcatacctttcacatgtgcccggcggggttgtgggcttcgctcaggcctgggtggggagctgaaagcaccatctgggggtctccaaccacacctgacaccttttcctcttctcgccgtttcaaacaggctgctttgggattcaggttccgctctggagggaggggggagagctctgtgggagacggtcccagggaggagaaagatgtgaggtgggagtggggggtaggatgtcgggggggggggtgggggcagagccccatcacgtgtggcctcctgtatttccggctctcacctccttccttgagaaggctggggggatggggtggaggcttgtaaagaagagagtgggtatcagggggtgtctggggaacatcactgggtctgagtccagccacaaagacagacatggacagagtccgggggcggcaagcacaggaggaccccagcatctgcacctgggtgtggggaagggagagggtgctggggcagccctggccggggagcctacctcgcacctgctgctccagccccaggatgacctgcacggcctgctgcaggatgagcagcttggtctgcgctttgtccgacttgaggtgcatctggcacatgcgccccagctcccggaaggcctcgttaatatcccgcacgcgcacccgctcccgcgcgttattggccatgcgcctctcccggtccctcaggtctttctcctccagggacagcacctcgtccgtactgctgggtcacagcaccgaggcctctgttagtgatgcgccaaggctgggtgggagggcagggctgggttgtggagagggtatccagctacttgtgtttgtgctggtgtgggcagcagtgtgggtacacggctggtgttggtgggcacagcagtgtgggcagcagtgcaggtacatggcttacattggtgggcacagcagtgtgggtacacggctggtgttggtgtgggcagcagtgcaggtacacggctggtgttggtgtgggcagcagtgcgggtacacggctggtgtgggtgtgggcagcagtgcgggtacacggcttacgttggtggacacagcagtgtgggtacacggctggtgttggtgtgggcagcagtgcagttacacagctggtgtcaggcactgcagtgcaggtacacggctggtgtcgggcacagcaatgcaggtacatggctggtgtgggtgtggacagcagtgggggtacacggctggtgtgggcagcagtgcgggtacacagcttacgttgctgggcacagcaatgtgggtacatggctggtgctgctgtgggcagcagtgcagttacacagctggtgtcaggcactgcagtgtaggtacacggctggtgtcgggcacagcaatgcaggtacatggctggtgtgggtgtggacagcagtgggggtacacggctggtgttggtgtgggcagcagtacgggtccacatgctgatgtgtgtgttgtcacatgcgtgaaaatgtgcttctctgtgcacgcggcgaatgtgctccctggaatgcagcagagccccatggtggggcgcctgtgtgtgtacgcgactggctgcccaggtgcaagtgccctcagactcagctctaggggaggctgtggatgtggtcacacccaggaagacccaaggtctgactgttcccagacgtttctgtggagggagatggggccctgcttccccgtctgggagcccacagggtaactgcttctcccttgaccctgctcactctgtgggccccagggcagggctgggggcaggggaggcccagtgcctgctcctctctttgttcttccctcccaagatgatgactttccctgctcagagcagccacttgcggggtgatggacagctaggcctggccagactcactgtggacagaggaggccttgaagacacgggctcagcaggcaaatacctgggccactccaaaaacccgggactggggagtccaggactcaaatcagggctcacatggagcaaaccagctcccatcccccgagacccccacaccctggggaggagcctcagaaatgcacccgtcccctacagtgaactccggctgccccaagatgagccctccctgagctcctgcccctggctgggaaggccagctccctaggcctccaggaaccccattgtcactgccaccgtgaatggtcgcagtaggagctctgaggttccaagagcctgttctgtgccaggcccaaggctgagccccctctccagccgagcagcatgcagctggcgagcgggcactgttgctgctgccgcaggggtgcgggtcccggcccaggcctctgtgctgcatggccctgcatgggtgacctcgctctgttccctggcttcctacttggtagaatggatgccggtccccatcagggcacccactgctctaggttgtggtgaagatgaaatgggtgaaggtctggcccagtgcccagcatgcctggtgccctgtcttagtctctagggggctgcctcacccacttgcctgcccaccctgccttaggggcctgaggggatccctccaggtggtgggggcggcccctggagcccaggacaagcgcacagaccaaactgacaggaccaggggctgcgtgctcccgggtctggtttcttcccgcaagccctgacggggggctttgggggaggaaacgccctgaggttgcagcccagccgctcccggtgctcgggcagcaagtgcgaggtgaggaggggctgccacgggaagcagagggacggacgggcgggatggaggggagggcggaaggcagacagcagagaggcgggcttggggggcgcgaggcgtgccacacacggctgcagagactcggaaaccttagagctgaggggatagcgtgtgggccgggccggggctctggctccggtcccagcaacagtgctgcaggagagaaagggttaacggggtgcaggcgaggaaaggaaggagttaaggaagcagccgccagcgccagcggggggaaggagtcagctcacatctgcgggtggggacagggtctgtctgtatccttcctccccctggccctgggaaatgggggtgataggaagtttccctatcaccttcagatagggaaactgagtcagagacaggggatgggctcatgtggccttgcgtggcatctgcctgacgggaaggggccagggtggtttgcacaccagctcctgtctctgggatcgggggacactggcctctgtgagctgggttctgggcttcccaagaaaggaggaccacggcgagtgggagccccgtggagctgggagatacagttctgagccacagagcccaggcctgaaggactaggggtccagaaagagtccagtcctcccactgtggaggggatgctgaggcaggcagggagaagggctggcagtcaggagtggacagtcatggcaatgcggtcagaggggtgaagggcacagtcactgcaaggaggcaactgctgcagagggagggctggctccaggaaggcgggcggggaaggagaacgagggcaggaacacgagggagggtggcgctgcagggacgctggtggcccgcgcccccactgacctcgcacttgctgctccaagttcaggatgaccgagacagcctggtgcaggatgagcagtttggtctggggcttctcgctgttgaggtgcagttggcacatgcgccccagctccttaaaggcctcgttgatgtcacggacccgcagccgctcccgggcgttattggccacccggcgctccttctcccgctcggccttctgctctggggggagaaggtcgtcctcgtcctcgtctgggctatggggagggcgccgggagggggccagagggagacagtgaggttgggggaagagcgtggggcccgccgacggcctcccagtgtgggtgcggtgtgcgtgtggcctgtgcacatgtgcgtcctgatggggtgagggtggggagtgccgaggggtgggttggcacctggtccgggcccggggggccttcagctccttcttctcctcctccgagtggtcagccgctgacgtgttctcctcgtcctccttctcctcccgcttgatctcgctggcggccgccgtggcacctgctcgccctagccctgcaacaggcctagggtcaggggcctgcgtcggcctccagggccaactgacatatctctttgtgctcctgtggtgagggacttgggctttcctggaaaaaccaggtcttggccaaaaataaaaacaaaaaaccaacaaccagaactggatccctacctcacgccatgtgtagctaccaatgccagacagattaaggaccacaagatgaaagggaaacagttttaccacctttggaacaaagtgtgtagaaattctgcagcaactcaatggcaggaatctactaagatgctaaaagaacactcttcttttttggtgaaagtaaactgtttcaatcattaacttaaaaatatggaacacttcggatgggcacagtggctcacaccagctcacacctgtaatgccagcattttgggaggccgaggtgggtggatcacgaggtcaggagatcaagaccatcctggctaacatggtgaaaccccatctctactaaaaatacaaaaaattagccagctgtggtggtgggtacctgtaatcccagctacttgggaggctgaggcaggagaatcacttgaacccaggaggcggaggttgcagtgagccaagattgcgccactgtactccagcctgggtgacaaagcaagactccgtctcaaaaaaaaaaaaaagaataaaactttggaacacttcaggaatgtccacgtcacccttgtgcagatgctatgctaatctttatcattctcattttagtccaagagctgtccaagcaagtgctcaaagcgctgcttttgaaagaacacaggccgggcacagtggctgactcacgcctgtgatcccagcactttgggaggctgaggtggaagggtcacttgaggccagggggtcatggctaccgtgagctgtgatcatgcccctgcactctggtgtgacagggtgagaccctgtctcaaaacaaaacaagtaaaaaagaaaaaacaaaaatcagtaagctggactatatcagaattgagagttcctgatcagcaaagataccaggaaaagaaaagcatttgccaaagaatagaagacacccaccacagatgtagccaaccaggaggtgatctcccacaatcaatgggaaaggacaaaaagaaagtaactcagtagaaaaataagcaaggtatccaaaaaggcatctcacagacaaggaaaccacatggctagaaacacgtggaagtccgcttcagcacatcaagagattaaggaaatgcaaattagggtggctttgcgctaccctttcatacccagtcagctagcaaagttgagggacctgaacagtcaaaatcttgcctgtgggagggcaacttggctgctttggaaaataattcatcagcctttcctctgaattgacaacaggtgtatcacacccttgatcagcaggttggcaggaaagcgtgatgttggaatgacctacagccccacgcccgggccagggccaacggcacactcacaatgggaccccagccgctcacaccacacatgtaccccacacacaacataagccagcaaaccagcgtgtaaagaacacgctagtgggacgccgtgttcatgaagctcaagaacaataattgcaaaacatgtggcttaagggtacacagtgccccaaatgaatgcggccactctgcattcagcagggcctgggccacccccaaaacccgggcttggggagtccaggaatcagtcagggctcacatggagcaaaccagctgccatcccctgagacccccgtaccctgagggggagcctcagaaatgcacccgctccccacagtgaactctgctccaatcggccaacgccagccaccaggaccagcccaggcctcagcacacgaagtgaaggacaggaaggaaacagaggggagcctatgggtgaaagactaagcttggggctgcccctggaaactgctgacctgtgggtccggacccttctctggggtggggccgtcctgggcactgcagggtgctgagcagcatccctggcccccacccactccatgccaggagctcccctcagccctgacaactgtagatgtccccagacatcacccagtgtcccctgggggcagagccgctgcggtgagatgccctggcctaggagtgatagaatcaaggtacttggaaagtctgcctggaaagcaggcaggattcctgggctggtggaaggcacagggccaggacagcgcccacaatgaccccaccttctcctgggcctctcatgggtgtctgagacactcaacaatccccaggcccaggtccagatttgtccccaaccttttcctttgtccccttccttacggagttcccagccccagtgtcacccacagctcgggccagaaatcccagagccaccctgccttctctcaccctcaagtcctgtccatcacaaatcctgtgggccccgccttcaggagatgcagggcccacccactgctcacccctccaaggcccctggaccagccctgtggcctctgccttggtctcccggtgccactcatagtctgtcctccaagcagccaccagagggtatctgtgagcacctgggtcaggtcccatccctcctcagccctccacggctgccacctttctcatggccaaatcccaagtcctccccgcagcccacaaggccccgcatgacctgccctgccccgccctccccccttccctctctccctctcctcactctgctccaaccccacgggtctcctggctgttcctcccaggtgcagtccagccccagggcctttgcctgggctgcgccctctgcctgaaaccctcctcctccaggtacttgcctactcttgcctcctcccagatgctgcccaaacaccaccttgtggcctcatgggccaccatcttcaaagccatacaaaacccccaacccaccgcagccacttcgttccttctccctggcacctgtactgtgcagcgagctcctggtctgtctcccctgaggcagaggcatcctgctgcacccctcgccccttccccagtgctgagcgctgccaggcacacagcgtctgggagcaggcgaatgaagaggcagcccagagctgtccacctcacacgcccagggccaacgccggccccgccggtcttacccaccctcctgaagttgctgactggggcgcccatgtcaccaggtgcccccacggtgacacctgccctgggctcccaccctgacccccaccactagagtgcctcagtttccccaactggaaccaggagtcggacagtcccaagctcaagggcttaccactgtaggagtcgggaggccgagacaggtcagggagggtgcctggctggctggggagggccgcgtggttgtgcatgaggctggtgctgcctgcgaggccgtcctcggggtggctgcctccaacctgcaggcgtggggagacgggtgcatcagggggagccgggtccccgcccactgcccagctccaccctcgcccagcgctcaccaggcctgcgtgccgcccgcccagtgacatggggccggtgaaacctgaggccagcgccccgtggccaggcagcagcgtgtgcatgtcgccggctgtgcccacggcgtggctgcggagcacgtggatggcctcgtccaggtggtcttctatcttactctgctgcagggtggggggatgggtggtgaggggcccaagccgagggaccccacaggcctccattcatgtcccttccgcatgcaagtggccggtggtcccatcttccccttccccaggaagctgcatatgccaggcatctggcgcccgggagcacacacaaaatgtgtgtgccttggcggccacgaggcctcaataacagcttggggcttatttacaagaaactaacaaaaaggtttctccttctcaaggagcgtctgtcctgcaaattctgtcggggaagggtggggtggggcggggcaggcactcaccaggccgtggagacccccgtcgtagctgggcgataaggcaccgggggctcctgctcgaggccactgtgacgttcctggaagggagtggggacgtgaatggggtgcgaggggcggggtgtgagcatggcctgatgcccatggggagggattcatgaaccaccccgcctgtccagcctccggtgatgcccaagatggccattccggggcaccccacactgatgcaaagctgctcggccccgccaggcagggatgctgggtgcccagtgggtactgccattcctatctctgagcctcagtttccccatctacaaaatccaactccccactcagaggataaagtggctcggcagcacacagtagggggctcctccccatgctgccccaccctggctgacccacgctgggctccagcagcaggcaagaaagtggcaagctccaggtgggaccagacaggccgaggtgaagtgagggttcctggcgcttcccatgggggcagagatgaggactcacgggtgtttttaaacacccagaccttctggaaacctccagttctcactccccctcctcctgtacctgcccccgaccccctgcggataagcaagcacgtcctcacagggataggagggtctgccctcccatgccggagcaccgcacagggtaaacagtcagtacctaataaatacccagtgggtgagcaaatggcaacacgcacacattctagagtccaggccacagccctggcgatgctggccccatcggacctgggagctgctaggcacgccaatgtcccctcatgttcacgcagtgtgaactgccaggtcctgcctcctggctttgcctgtgctgtgacctaacctggacgccacctcccagccctccctcactgcctggttatgtgctatagccttggagggctggcttggaggctgcctccactaggcagctttcctggattgcccagtggaacacaagcccatgggggactcccttccaccgtcggttcctgaccagcgatgccacgggcccttgggggccatctgctccctccccgctgcctgcctatcccagcaaggtgcagacaccagaaccagcctcccctcccccgcaaagccttcacagacctcagcctcccctccccccaaaccctcacagacctcagcctcccctccccccaaaaccctcacagacctgccaggccctggggggagcccacgggggtagaagggctggacgagaagttattgcttgagtgatccggggagtagatctgcgaggaggaccaggagagatgggcggtcaggggccggcctctcaggtcacttgcctggccaccccccatgccccacgcctcaccgaggccagtgctttgccgagggcatccccggagctgccagctgtggtccctcgggagcctgtgggtgaagagaggtgaggcccacgcagcccggcctgggtgctgccgccgacggcaagctctcctgcgttctgccgtcctgcacagacactgctgcgccagggagagcagcctgactcgggtccggtttctgtctgaccccctgaaaccagcctctgcaggggttgaggcactggggacaggccactggcaggggaccctgggtgggtgagtccccttctgggcctgggtgggtgagtccccctctgggcctggatgggtgagtccctctctgggcctgggtaactgagtccctctctgggcctgggtgggtgagtccctctctgggcctgggtgggtgagtccctctctgaccctgggtgggtgagtccctctctgaccctgggtgggtgagtccctctctgagcctctttcccagctgtaaggcgggaaagccgctcctcaaagatctgtttccagacatcccaagcccaacgcacgtggcaggccctgcagacagcggacaatgagaactgacaacaacccgctctcagggccagcagacgcgcctgcgcctcccgtggagtcctcgccaccccccacccagaccctgcctggagcccagtgtcccctcggagaggccgcatcccagggaggggccatacccaggaggctgtcggccccgctgacaggcggcgtgtggctggagacgccgccgtacgtggctccgggggctgaggagaaggaggatgcagatgggagcccaccgttcacctctgctccatgcagctggtagccctggggggtcaggcaggaggagggtgggttagatgggcactgccaccctccgcccaccccctgccccctgccctgggtcctaccatacgctcgtgctggtgcaggccaccaaacgtgctgctgcttccactgctgcccaccgggccgctaccgggcgggaggggcagcggggatgagcccccacccagcatgggcccgaagcccgcctggcccgggggactccagagctcggctgaggggtgcaggctgccatctgtggaggggagctggtaaggtgggggccgagtggggaaccccagccctgccctaccgtccctggcgagcccccgccctgccatgtacctgccacgtagaagggggcgggataggtgctgctgggggtcttggcggacgggtaggcggtggcatccctgccgtagtcctcacctgagctgggtgggtacacctgcgggcgggtgggcggtggggggtgcagtcaggacggagggaccacgatcagcccatgcaccttgccggcctcctgtcccctcctggtagcacatctaccaccccgtttcccttccctgtaaagccacccccctttaggtaaatcccagcccctggccaagtttgaggttcttatgatgtcctggtctctctctcctactccttttccagcccccacctcccgcctccctgaacttctgacctttgtacttgaggacttggatctggctctgcctactaaacctttttcctccttaatccagaaaactcctatcgacccatcaaaaccccagctccaacaccccatcccatccttctcccttgttccccagctggaatcaatcttccagtgctgagcttcccttggtcccagagcaacattcgtccttcactaaagtaacaggaagaggggtctgtgagtagcgccagctctgactggttggcactgcctggactgtggggctggggcctgttggtaacgtctgctgctgtgctggagcgggaagtatgctgggtgggcctgatgttgtaataaactggggggcggtttcagggcagagaaagtgcaccctggggaaggaggggagtgagtgatactgttgggagcagagcctgaccacgcctttggcctgggaagtcaacctgactctaaccccgaacccaggcctgtggggagctggtcggctggaggggtgaggagatgtatgcccagggctcttggggccagcacaggcactgggcagagggtggttggtggctactgagccagggaatcggcaaattccctctccctccagcgagatgagaccgcaggagtgtggcacagcagcctggaccatctgcgaggcctggtagggaggcagggatgcggggcag[132 bp omitted]cctccgcctcctgggttcaaacgattcttctgcctcagcctcccaagtagctgggattacaggcacgcaccaccacgcccggctgatttttgtatttttagtagagatggggtttcaccatgttgactaggctgatctagaactcctgacctcaggtgatccacccacctcggcctcccaaagcgctgggatgacaggcatgagccaccacacccagcacaattgtgccctttctaaaggggcctcagccaccaggactgcctttctctcaaaacaagacagacagaggctggacctagggaaggacttccccgccttcccttggaggcggcctcgggtcagagctcagatcttggctcagaaatcacagggggcctgtccactcagggcccaccccgccatgtgtgttcccaagcttcgccaggacacagggcctggcactgccactgacgagctgtggggtcccttctccctcgtgcgactcaccgaggatggaagacccggcgggaccttccggaccttcttgggctgcgtgtctgttagaagcaaaaggggtgagaaccggccaccggccatgagaacaacccctgccctacaccctggaggagagaccctcacaattcccgtttcatatattaaaaacctcgggtcggctgggtgcggtgcctcatgcctgtaataccaggactttgggaggccaaggcaggcagatcacgaggtcaagagatcaagaccatcctggccaacacagtgaaaccccgtctctactgaaaatacaaaaagtagccgggcgtggtggcgggtgcctataattccagctactcgggaggccgaggcaggagaatcacttgaacccgggaggcagaggctgcagtgagccgagatcgtgtcactgcactccagcctggggacagagaaagactccgtctcaaaacacaacagcagcagcagcaacaacaacaaaaagccccgggtctatttatacggctccaaagatgtcgaagaaccacgatggttttctcccgcgacgcgcagtttggaaaacgaggagttggtggattctaagccaaggctctgctgagaagccccttggccccaccctccttccaagatggccccgactatcccacgcagtcaggcttcaccactaggggctgctgtttgcaaactcgcctacaggataaaatccgtaacccggaaaccagcactcaggcgccttcctgatcactcacggacgtgcgcacagtgggaaaagttcgagtggcccaggcgcatgtgcccagccaaggcggaacagaggcctcctcccgcatcatggggctcctgtccttggtctattcagagccacgatcttttacgtttttgtgctttttgtgggtgatttcacgcttatttttttcaggcagggtcttgcgctgttgctcaggctggagtacaatggtgcgatcgcagctcattgcagcctcgaactcccagggtcaaaccatcctcctgcctcagcctcctgagtagctgggaccacaggtgtgtgccaccatacttagctaatttttaaaatttttcgcaaagatgggatctccctatgttgcccagaatggtttgcaacttttggcctcaagtgatcctcctgtctcggcctccagagaagctgggaccccaggtgagtgccgccatgcctggcgactgtgctgcctggaatgggccccgggtagttcaaggcgccgtccagtgctcctgagcccgaggctgtgacgtgcctcgcgggggatgcccgcgtgtgcagcagggctcagtgcagaggagccacgatgcagccccatgaggcatctgacacagaaagcacatggcagagcccgtgcccgtcagctgcaggaacctcgggaccagaggctcgtaggaacctctccctggacgtgccacgcccgccggcccctgcctcgaccccccgtcaccgtccatccctcccacggcccgagcgcccgacgtccagccaggacctggaaggtgcggggtctgctccctctggtgccctcagctaacgggaagcctcctacctccctttgcaggctccctcccagaagcccccgatgccccggccagaccccgctcacctaggctgccgtctgccgctctccgccgggagctgccggagtaggaggggtagtactgggaggtccccttcatgcccgaaggggacaggggcccggggctgttgagggccagctcgcctgacaggaagccagcctggtggggagcggatggtcagaaagcgcccagctggcatccagaccccaggctgttccattcaagaaaaaactgcaaaggccgaagccactcagacccgccctgcagtgggtgatgccccttctgcctgtcacggtgtttctctgtgacacctgctgtgtttttctgacttgagactgaccgcatcccacactgctgttttcacgaagaacgaaagactgagaaacagataccagtgtggccaacccaaggggctgctcccccgattctgagacgcaaagtacaaagctgcgtggctaagcgtctgtgcacccggctgcttcctatctttttggttttgttttgtaaagccctcggttggattctgtacatgttagtgtgaaacgggctttcttcctggggagccagggctgccctgagccgggtcccggaactgactcctgcatttcatccgttctaaggccgggcacggtggctcacacctattatcccagtactttgggaggctgaggcgggcggatcacctgaggtcgggagttcaagaccagcctgaccaacatggagaaactccgtctctacaaagaatacaaaattagccgggtatggtggcacatgcctgtaatcccagctactcaaaaggctgaggcaggagaatcgcttgaacccaggagacagaggttgcggtgagccaagattgcgccattgaactccagcctgggccatgagcgaaactccgtctcaaaaaaaaaaaaaagaatcatctgttctatcatcatccagtggccccacggggtggcccagcgcccaggacagggccttctcccgaggcccggcctgtcctgagcccgcaccctgtgtggccaccgcggggctcgatgagtcacccgggagcgccagagagcagggcccgagccctagttctgcttctcggatggggagcccgggcacttgcgtattcctgtctgtaaaatgggcacgtaggccgcggcccctcgttgcggggactgatagggaaacgcgcatctgcccctggcgcagagcctggcacccggctggccccctccatcactatggctactgttgctctggcttgggcacagtgagcacacagacggccccacctgtgacaaggccgagccccaccgagagctaggagctgacggcggggacagagatgaagtcctggggtgagggaggaaccctgggggtgcccagcaccggaggctgcatgggacccctgtggctggtcacagcccccaacatcctcccccagcctcacaaccagggccagcgtgggtgaggatctcggctgcacaggggcctgttgtatgggctccccagggggtccacacctgcaaagccctgctgcatggcctgttttcctgcctgccactcagaggagagggcaaccgagcccctccagctaagcatggcagccctgcaggccttggcctccctggtcctcacctacctcccctctgctcccggtccacacccacccagcccaccctggcccaagcccagcctggtttcgctatcaggaagcaaacataacctagctaagccaggagagcttctgcagatcagagagggtgggtgacagatttgtttaaaatcaaaatacaccccagcccggcccgagcccctcacctgagtcaggccgcccacgcctgcgtctctcccgaaggaggcataggcgccccgctcaccgctcttgcctgcaaggggagaaggaaggttagtgggaggcgaccccaaggaacatcctgagggcccccgagtgcctgccatgtgcctacaataggctctcagtaagtgcacacgactgagagcgccacggcaggatgctggcagagcctgaccccagtgtgcccatctcggggagccctggccccagtatgcccatctcccgcagagccctgccctcagtgtgcccatctcctgcccaatgacaggcttggggacaagaaggggtccccgatgatttcggggccaactctgagcatctgcagcccacagaagccctgcccagggggtggggcggaaaggggacagcagagctcacggggtgaggtgggaaggggacagcagagctcacagggggtgaggcgggaaggggacagcagagctcacagggggtgaggcgggaaggggacagcagagctcacagggggtgaggcgggaaggggacagcagagctcacagggggtgaggcgggaaggggacagcagagctcacaggggatgaggcgggaaggggacagcagagctcacggggtgaggcgggaaggggacagcagagctcacagggggtgaggcgggaaggggacagcagagctcacagggggtgaggcgggaaggggacagcagagctcacgggggtgaggcgggaaggggacagcagagctcacaggggatgaggcgggaaggggacagcagaactcacggggtgaggcgggaaggggacagcagagctcacggggtgaggcgggaaggggacagcagagctcacagggggtgaggcgggaaggggacagcagagctcacgggggtgaggcgggaaggggacagcagagctcacggggtgaggcgggaaggggacagcagagctcacaggggatgaggcgggaaggggacagcagagctcacagggggtgaggcgggaaggggacagcagaactcacggggtgaggcgggaaggggacagcagagctcacagggggtgaggcggaaaggggacagcagagctcacaggggatgaggcgggaaggggacagcagagctcacagggggtgaggcgggaaggggacagcagagctcacgggggtgaggcgggaaggggacagcagagctcacgggggtggggcaggaaggggacagcagagctcacagggggtgaggcgggaaggggacagcagaactcacggggtgaggcgggaaggggacagcagagctcacagggggtgaggcggaaaggggacagcagagctcacaggggatgaggcgggaaggggacagcagagctcacagggggtgaggcgggaaggggacagcagagctcacaggggatgaggcgggaaggggacagcagaactcacggggtgaggcgggaaggggacagcagagctcacggggtgaggcgggaaggggacagcagagctcacggggtgaggcgggaaggggacagcagaactcacggggtgaggcgggaaggggacagcagagctcacggggtgaggcgggaaggggacagcagagctcacagggggtgaggcgggaaggggacagcagagctcacgggggtgaggcgggaaggggacagcagagctcacggggtgaggcgggaaggggacagcagagctcacggggtgaggcgggaaggggacagcagagctcacggggtgaggcgggaaggggacagcagagctcacagtggccctgcttcctgctggccaggcccctgcccttcctgagcctcagtttcctctgtttcaggcgttgaggggctgatgccctggggtgctggggtcagaggcatttgtctgtcccaggggacaggcctgggggccctggcggggagccccggggcctgtgcacaccgcatcaggttcaccgcacaggctcccccaaagtgcccagcattcagccttcaggccagggttcattcgcgaatgagcacgtgacctgcaccccaccaatgagcacttccctggggcgctcagtgacaaaggacaggtgaggcctcggggctacggagggggtcagctggccagggcgagcccccagcatggaaggcctgggctacggaggggaacagctggccaaggcgagcccccagcatggagggcctgggctacggaggaggacagcctgccggggcgagcccccagtgtggagggcctggggctgatgcggtgacacctggatccagccttgcctgaagcaggcaccccgattactcaggacctgagccacttaaatccccttctggctgacactgggcacggaatgtgactggggctgctgtgaggggctgggacgcgcgatcgagtaatgtacattattctcaaagcaggaaaaaaatttcccgatttttgaattttaaaagttcaacgatttcccaactcctggaacaaatgctgctgttttttgcctcccgtttcctcatcttggtgacccggggggacatggggaagatgacagccacgacccaccccacaggccacacccggccacagcagtcactcgcccggctcctcgggtgagaaaactgaggccataggagactgaggttatggcaaaagccccccgtgcctccccgggacccccgcctgccctctccaagctgcctggctatggcctgggccccacccgtgggggtggcaggtgggacatggctgggctctgggcattgctggccgggccgtgggaactgcccacgtcagccctgcccaccctggggccatcgggggtatgaggaagaggctgggaggaaggaacagccagtgaggaaccaggctcccaggtgcaggggccacccccggcaggggggcggggccaggcctcacctaccccgtaaggggaacgggcagaaatcgcccgtggcacgtggtgggccctcagacacacccgccagaccttcacgctattcgcttcctactcaggacaccaactgactctactgtactccaagttcgaggccgggcaaagcgagacaggaccgtccctgccccgctgtggggcccaaacaggcgctgcccctcagggtccagggaaaaggctgggtcggccaaagtcctccgggcctcagtttccccgcaagccaacaatgccgaggggtacacggtgagcacctgggccccgcagcaggtccagtgccccacagctcccggcttctaagcagcgcacacccccactgcaccacgaaaagccagcagaaacactgcctcaaaccgtcgggttccagagaagggaaggatcccgcatcccaggatgactgagggatgaaaccacaaattccacagctgaggcactggggcaggaggctgaccacgacagcgggacccctgaggcccttaccagccccccaagcagcgggacccccccaagacccctacctgagcccccgaaccctggggcacaggacttgacactcccgcaggaggcggagcatgtgaagctcggggcatttcctgtgtcacccgcaggagggaccgcacacgggacactgtcccagtcgcagccccaggtgcctggaggagggcgtcccagtcagccccacccagccgcagacccccggccagggtgcccttcccaagcgtcggttcgttcccctgcagcacgggtgagcctgcagcggggctggaatatacccaagaccaggcaccaacccccacctggcattgggcagggcctgcagagctgggtcagtcctcaccgcctccctccaagaaggttctgggagggtccctttcccacagtggggaaactgaggctcagaagaggatggcgcttgcccaggttccgtggtggggtgggaccagacaccaggcctgagtcttcattctttttttttttttaagatggaatctcgctccatcacccaggctggagggcaatggcgtgatctcggctcactgcagcctccacctcctgggttcaagcaattctcctgcctcagcctcctgagtagttggcactataagcatccaacaccatgaccggctaatttttgtgtttttggtagaagcggggtttcaccatgttggccaggctggtctcaaactcctgacctcaggtgatccacccacctcgctctcccaaagtgctggtattacaggcgtgagccaccgagcccaacctgagtcacgattctctcggttaacaggagggccccccagggaaagagggcgggcgggcggtctgcggaagggcatgggctctgaccaccgcacactctggccgccctcccgagtctccagaactcctacgcctccttcccagcgggcacaggccagcccggctgacccctccccgggaagcaggaggagccctgcagaaatcccagggaggaagtggggtctggaacggcctccctgcctctacgctcaggcggggaagcctagttgcagagtgccgtgccagggagtccgggccacgtcccctgcacctccccgcagctgctcccaggacgggcagaggcttcggctgtccacaccctctgggtgaacgctggggacttgcctggcgctgtgcgtgcactgaccatgccaaggcccacgtctgcacatctgtgcacagcagagggaccgcaccaggccaggcactcacctccgagtcccggtcccaggaatgtggatgaagagaggctgctgtgcgactcagtgaagtgggtgccctcgctgaaggtctaggggagatggggtggggatgagaggtgctggggcttcacaggccccccctccaccccgcattacagctggagaggcaggactcaaacccatgtcccccagtccaaacccctggaaggctggccccttctctcagcctcagtttccccacacccctcgcccccaactctggggacaggaaactcagggtctcaggcctcacggggactcctacccggctggggtcaaaggaggagctgctctggtcgccgctgccccaggagcctgagctgggccggtcctcaagacctgcaggcaggacagagagagttatgggtcaccctcacgcctgcccagctctaaaagcttcggttcatcatctcaggggcaaacctcagtggacccggggggcttgtggaacccttcctaacccagcctcacccagcccgactcatgaggacaccagtcagcagctaacacccagacaccctgggactcggagcacttacaggtccataaacttaaattaactcttccgtcggctctctgctggccaactcctacccacccactaaagccccagctttcataccctccttgggcaaagacctcactctcacgccgagcctcctccccatcagccccaagtccctccctctggcccagccctgactatgtggactggggtctctgtgtcagatgcagactcttctgaccctgtgagaaaggctcatgacagcatgagggtgtggaagctaacccatgagctctggggaggcccagggtctccctgtccccacctgccagtgtgggaagtggggccgccctttgctgaagcagcagcagaggctcacccatcgggcaggaggctggcagcccgtgagggtggagccgaatctcatcacccaggaacaagcccagtgtggagaccagaagcctgcgtggggcaggagttcccggcgcagcaagggacgggacgaggaccttggtcccggggcggggcgggcggggcccttatctctcagaacactcacaggcaacgcccaggactccagaatcttctgccctgggcagggagggcctgcttggatccttcccccttccatcgggggccacagagcacacccgtggagaagcaggagcgggccctgggcctcctcagcttggccacggagttgctgccctgccttggtttccctctctataaatgatttacaaacaggccctacttttgcagggctgggggtgtccatgtccaactcccaagtccagaggcttcccgagagccaggcctgggggacccagcccagtgctgatgtctgtgaccggcaccacctcaggctgttctgcaggctcccccgccccgccccctgccctccctgctcatccacaccagaaacttctttcaaatcgcatccttctatttcggtgcctttgtgttaatcattccccccggggagtattggtgtttaattgctgtctgatttgcataattatgcatattaatctccaagtctaatgaatattcatgcgcctcatttagattttgttttctaatcaaaaatttccaatgtgattatgagtggggggctgggatgctgccttggctgggttgggggccaggcagggggctcctgtggtctccaggaatccacacggcattcgctgccaggtctgggccatctgcaccccaagatcctggtcctgcacgtgggccctggtgaacagggcagctgctgaggccagggtgggctggctgtgtaggggtgggcacagcgccggcaccctctgggtctcagtttgcctctataccacctgcatgttgtctggtcccctccggccatagccagtaccccaggaggtgcagagacccccaactgagcaaacgggaggctcctggcaccccagccctcatcccctggaaggcctggtgtggtgggggacctcctggggccccatgcccagggatcgcccccgaagttcactccaacaggcctgtgccagaggcactgcggcctcaatctgccctttgggggaaccctccctcacccagccttggcctcctcctagaaatgacaaaaataaggacagcccccacattaatacagttattaaaatcccccccaccgattaatgatgcattttaataacccaccatgaatattcataatgcatccattgctcctgttctaattaaaatgtactaatagaataagacactgctgtcagagtgtggttttctgtgatttctttggtgaagcaccgcagagttttacccgggaagggcaccttcctgccctgggccagcctggctgcctcgggagaggcctgcgagtggacggcgcaggggcgctggggagagggccccaggagcggcccaccccttgggcttcagttccaattccagtcacggggtgtggaagccgcccacctgcctgggctgccgtgaggataacaatgaaagatgctgcttcagagaggccatccgtagccaaggaatgctccaggctggtggtttcccagtcccggtccctgttgggtcccctcctgagagggaccggggactggtctttgcctggtggctcgttggcaaatgggagagggaggcttcaaaaggcgcttagtaaataccgggtaggactgagattggtctgcagcagggatctgcaaacagtacacaaggaccaagtctggcccctaagctgctttttaaataaagttttattggcacacactatgcccgtttgtccatgtactatcaacggctgcttttgctgcaacagtagagttgaatcaattccaatagagaccatctgtcctgcacagccaacaatattcactccttggtcctttccggagaaggctggctgaccttgatacagaaaaagactgtccaagtgccttcagctgcctctgcacaagaaacccaatcgacagacttcagtaccaggagtggggttaccatgccgggcaggcaaaactattggtggacacgggccctgaacacagccctgtgtaccgcccctgccaaaccctcaggcacaccaccaggtggtctggcttcagatgggcctggggacttcatcctatagccccagctctgcaatgtgcccccactcaggtgctcaggctaaagtcctgggagtcctcctcaccttccctcctcccaaagaacagcagcttgccccatagctacagcagcgggttaagcccagtccctgcagcagcttccttccaagtctgctgacatcctcaggcagccggatggagcctttagaagcaaaacttggctcttctccctccctctaccctctctcatggctccccaccgtcctcaggataaagaccaaactctttcctgatctcaccactctcctcttccccaacacaggaggtgacccccacccacaccccctgcctgagccccttcccagcctgggacccctctttgtctgcagcactgcctggaacacagctgacgcccccaaaacacccaccctcaacgtcttcattttactcataaataactgtgcttccaagaacattttcctggaggatcaaaatattctccacctctgctgtccaatacggggaccacactaccaactgctggaaacgtggccagcattttttcaagcacattaaaaattacatttaaaaatgtgtatatggctaatgcctgctgtactgaacaacccagtccccaaaagcaaatgaaataacagccaccaccaaataccacggtcacgtctaaaaaccaattaacacctcgacagctcctcacgcaggttccgtttactcgggagtaggagcgggccacccgatacagggtcactatgaccccccaagcccgtgcctcgccccgtctcttcttcctccttataattaaaatcgtgaaggaccccgatggcagcctgtcccaccgccctgcctgggtctggcccctgcagcttgtgatgcttctcagacccattcccagcccctctgggggtcatgacgggtgagatcagacagaggtttgaatccgggggtggcctttccttgggtggagcagtattttaaaaaattttttttttcttttgctttgagacagggtcttgttgcccaggctggagtgcagtggtgcgatcttggctcactgcaacctccgcctcctgggttcaagtgattttcccgcctc[131 bp omitted]gcctcagactcccaaagtgctgggattacaggcatgagccacaacgcctggtgaatttaaaaaaatttttttgtagagatggggtctcactacattgcccaggctggtctcaaactcctggactcaggcgctcctcccaccttgtatttcccaaagccctggggtcacaggcgtgcacagcctccattttatctaaattcaagctatgggagaagatgaaagaccaggatgccctcggcccagctcgcgcactgcagccgccctgggtttatcttcctgtcgtgtcttcttggtcagggcccgcaggctgtgtagcacatgctcccagcttctgaggaggatcccgagtgggggagaaaatgcttctggggcaccacagagcccttccttgttggggggctgacgagatcccgcaaagcctcccacttcgatctgcctctaatgtctggcgatggggggtgggacagcagggccctgtggcccgcccgcgagcagacaaacctgaggctgaagagaatgtgagtggagaccacacaccaccctaagagtgggggtccccacagcacctaaagtggcaggacgtgccctcgggtagaggcacagtgaggctgtgcgggcaacacaggcaacctcctccgccagaaccggggacgcctcgcaacctcctccaccagcacgggggacaacctcctccgccagaaccggggacaactggcaacctcctccaccagaagcggggacaacctcctccaccagaaccagggacaagctcctcccccagaaccaggggcgcctcgcaacctcctccaccagaaccgaggacgcctggcaacctcctccaccagaaccgaggacgcctggcaacctcctccaccagaaccggggatgcctggcaacctcctctaccagaaccgaggacaacctcctccaccagaaccagggacaaccttctcccccagaagcaggggcgccttgcaaccccgctcccccaaggccctggggtttccctggagggcagagctggccccgagagtgggcatcgagcacagatgttaagtaacaactcagagaaacagggccccgctttgaatttcagtgaccacagagataaccgagaccccatcccgctcttgcttccatgtctatgggcatcaccagtgacacctgagtgtggggacc[139 bp omitted]ggtgaaacccccgtctctactaaaaatacaaaaattagctgggcgtggtggtgggcacctgtagtaccagctactcgggaggctgaggcaggagaatggcgcgaacccgggaggcagagcttgcagtgagccgagatcgtgccactgcactccagcctgggcaatagagcgagactccacctcaaaaaaaaaagaaaaagaaaaagagacacaagagggaacccaacatggaacaaaaaggatgaagttcaagaagttcaatgatttaccctaaaaaacgagaagactgtcttaagcctgtaagccccatggatcctcaaagaaatggcagagcctgggggttctatggaatgaagtagacagtgagcacatttaattacgaatcaagagattcctagaagccgtaacaagacaggcacacaaggaaagccctctgggggcactttgtgagttctctctcatttcactgaatccttgcagtggctacattacccctaccctacagataaggaaactgacgcaaaagatagatgccatttgctcaagccctcacagtaagtagcaaagtcactatttaatgatacaaatgtttcctagtaagatgcaaatacacaattatgaacagatacaatgtttttttgttttttttgtttgtttgtttgagactgagtctggctctgtcgcccaggctggactacaggcgcccaccaccgcgcccggctaatttttttgtatttttaacagatacggcatttcaccgtgttaaccaggatggtctcgatctcctgacctcatgatccgctggcctcggacaatgttttttaaaagtagcaatttattggtagcaaataccagcagggaagagaaatatacaggctcaattttcaccttctcacagaagggggcagatgcgatttcacttcggacgttgagagcgcgagaaacggcgtgtttaaacgtgttcttcacaacgcagaatactaaccgctattcaatcacggccttaaacgtgttattcaaaactagaaaagaaccactggcagagccgcaaagcggtacagagcttcagaaaacacacaccgggggaagcaatccggagttgggagcacacagatggaaaaacaaaataagacgatggaaggaaaagctgagaacgaagatggacgggtgcttaacgtctttaatctgaaaacacggtgccgaccaaagacagttttgaaacaagcgactcaggagatacaaccaggagcacaaagatctgccaagccacaccaacaaaaaggaagggttgcaaccttcatatcgaagtttcaattcaagggaggtttctttttctgagacagagtctcgctgtgtcgcccagggtggagtgcggtggcgcgatctcagctcactgcaacctctgcctcccaggttcaagtgattctcctgcctcagcctcccgagcagctgggattgcaggcacctgctaccatgcctggctaattttttatattttagtagagatggagtttcgccctgtgggccaggctggtcttgaactcctgacctcagaagatccacctgccttggcctcccaaagtgctgggattacaggcatgagccaccaccaccagccaaggaacggatttttttgttgttgacaatggctcgacccacaacgaaatcccactgtctcagcccacacaagcccacaatcctggcatctaaatacgtcaacagagaaaccgacaaacagaacagagggggatggcgctgctctcagcctgacattaaacagattaaaaatctaaatatggttcaaaggcctcgcagctccacatccaactatccctcaagtactcacaaagaaggacaaaaataatccatgtttcagcctcggcagaggagctctgcgtcctccaaacagtagctaccgtttaagccaaagctgagttttggcactggagatctagaaatcaagaaaggacctccaacttggaactcagaaacctctgaagcaacctgacctgaagaggaaattaggaaaaaaaaaaaaaaaaaaaaaaaggaacaaatgtcagtaatatgagaaaaacatgcattatggaaaccaatgggatggggttcacggggtggaaccctcaacaccacactgatggaacagaagagggcagaagtcagcaaaaggggcctgtgatctgaaagtcaccaaaaactttagaaagagaagaaatgccgataaagaggaaaattgatcaattgatcaatatcgatttgccaatgaagcagattctccagaagaaaaatcaacgagagagagaaaatgcacagggcagccgagtcaagaacaaagaaaccacctaaaagttggcgcattgaggaccgcggcgccctcagcctccctgcgcaggtggaaagacaggcgcctccaaacgttatcaaagagccgaacggggccaggcgcagagggtcaggcctggaatcccagcacttttggcacgggtggacagacaggc[136 bp omitted]cctgcctctactaaaaatacaaaaaattagcgcaatggttactaaactctctaagtttcagcttctttaccagtaaaatacggtaataattacacctatttcgctaacctgttagaactgagaattcccagtgaataagccaagctttgtgtccaatgcacagtgctcaagaaacactgatgtaagcagtggctcacacctgtaatcccagcacttcgggaggcc[133 bp omitted]ggcgtgaacctgggaggcggagcttgcagtgagctgagatcacgccactgcaccccagcctgggtgacagagcatgactccgtctcaaaaaaaaaaaaaaagtgatgtaaattgt[136 bp omitted]cgaaaccatgtctctactaaaactacaaaaaattagccaggcatggtggcaggcacctatattcccagctactcaggaggctgaagcaggagaatcgtttgaactcaggaggcggaggcggaggcggaggttgcagtgagctgagatcgtgccactgcactccagcctgggcaacaagagcaaaactcggtctcaaaaaaaaaaaaaaagttaatgaggcagcaataaaaagaaaaaaaaaagatacagccaacagcttggctggatctccagggaattatgctaacgtaacagaataaaagctaatctcagaaggttgcaaactataggattccatttacacaaaatactcaaagtgaaaaattgggctgggcacagtggctcacacatgtaatcacagcactctgggaggctgaggtaagaggatcacttgagctcatgaatacaagatcagcctggagaacacagcaagaccccatctagacaatatttttttattcttcagacacggtctccctctgtccccgaggccagagtgcagtggcgcaatctcagctaactgcaacctccgcctcccaggttcaagtgcttttcgtgtctcagcctcccgagtagctgggatgacaggcacgcaccaccacgcccagctaatttttgtatttttagcagagacggggtttcgccacgttgactaggctggtcttgaactcctggcctcatgtgatccacacaccctggcttcccaaaatgctgggattataggtgtgagccaccgcacccagctgaaatttttctttttttttaaacagagacagggtttctccatgttgcccaggctggtcttgaactcctgggctccggcaattctcccatctcaacctcccaaagtgctggggattaccagtgtgagccgctgacccagccctctacaaaatacatatttttttaattaggtggtcgcagctgctcacaaggctgaggtgggaggatcagttgagcccagaacttcaaggctacagtcagttatgatcacaccactgcactccagtctggacaacagagtgagacctggtccctaaaaaaaaaaaatcgtacagatgaagaacagattggtgattcctgggcttaaagaaggtgcatgtctcaaaactgcacagaactacacacacacacacacacacacacacacacacacacgcacgcgtacacacacgcacgcagacacagacgcagacacgcacacacgcgcagacgcacagacacgcacgcgcagacgcacacacacgtgcgcacacacgcacgcacacgcacagacgcgcacacgcacagacacacacccgcacgcacacacagacacacacacgtgcgtgtaaagccggtggaatctgatcaggatctgtggacggcaccaatgtcggcttcctaggtctgacgcagcaccacgggtgggcgggacggtacccctgggggtggctaggtgagaggagaacactctgccacttcctgtgaatcccgaaagacttcagaataaaaagtggatcaacttcaaggacgagggcccaagagagtaacagaaaattcaccagagagccattcacagggtcaatccccttccgagaagaccaccgccctctattaaacaagtggcaggtgaaaggacacgatctttgtcacctattaaatgagacaggccgtgctgtcaccacgttggccaggctggtctcgaacacctagtcccaggtactcctcttgccttggcctcccaagtgctgggattacaggcctgagccaccgcgcccggtcacaagggacgctttcaatgtgaaaaagcatccagggacccagcaattccactcccagacacgcacccggaggaaatgacccatgcgccaggttctcccggggtttcctcttaaagcagaacgcggaggtgccgttctgtggattttcactctgaccgtgtgtcacacttacaatcgcacggacagagaaagcgacggggaaatgaaaaataggaaagaactttcctttggtccgtcaataagcaatttcctggtgtctcccgtggcctcagagcctgtctgtcttggcagaagataggctgtcactcagagacctgtgcctgagggtttccaaaaatgggaggcggtgggtgggagaaggcgtacgaaaattattcccgttttaaatgtcttccgatccagacaaccagaaaatcttggtttcctattcgttaatctctaatgccttttttgtttcgtttctgttttgagacagggtctggctctgtcacccaggctgcagggcagtggcgcaatctcagctcactgcaacctccgcctcccaggctccagcaatcctcctgcctcagcctcccgagtagctgggaccccaagtgtgcgccaccacgcccagctaatttttgtatttttagtagagatgaggttttgctgtgttacccaggctggtctctaactcctgcgctcaagcgatccttccgccttggtcccccaaagtgctgggattataggcatgaaccactgtgtctggcccttttctgtttgtttgagttggggtctctcagtcacccaggctggagcgcagtggctcaaacatagctcactgcagccttgacctcctggcctcaagcgatcctcctgccttggcctcccaaagtgctgggattaaaggtgtgagccaccttgcccagtacctaactcctctctcgacaccaatttttaaatatttataaatatcgaagaacaggcagacccttcacaggggaaaacttatgtttaattaattttcagggacaccttttattctcacctgggtttctggttctcaaatctaaagtttcctttcaaatgaacttaagaaaagcgaggtgacttaaaagggagctagaacagggcacatgaagaaggggccaaggtggagaatgcggctggggtaccccatcagccatcagcgttggggactcctggcgaagggtggcgtccccgaagccaactaggccccgcctggaaggaagctgcacccactgttccaggaagaagccgaggtttgggaagggatcccacagctccggggctccatcctgctgatgagccccaaactcccctcttcctgggtcctcggagaggagaagcaggaagcggggaaatgagctactgcagctcctgggccctgccgggatccctccgcccctcgcacccatcgactcgctgaacctgacgatggaagagagcaggtgcccatcttgcgggagcttcgggagggccacacctggggccagcgccacagcctgcaggggcctgggggagtggaggcaatgaggagggtgccaccaactcaggccttggagctctgcatcctccaccacccccgggctcaggcgggcgttaactgcatggactgaacggggagggggtcacccctctgtgtccaggagctggggggtcccaggctggagcagccacatcacgtccctcaagggcaaaaaatgcaacatactgggcctcactgggccctccaaagcctccgccctaacgtgtgaggggacaaggcgagaccctcccaacctgcagcattggggcagggccggagcacagggcgagactctgtgggaaccacagaaaatacatctgcaaacattggcaggttcctgctgggaccgggctgggcgtccagggagaggcaacccagagggagcattctcaggtccacacggcctacacaccacagctctggttacccagggaccaatctcacagtggtccgtgccagggctgagggggtgagaggcgacaggggacgagggaagacacctcccaccccaccctccccaccaggccctgctgtaagcccacccagaggcccaggagaatgggggtggacggccttgggagttgcgcttcctcctccaggaagcccccagggcctgaccctctgcctcacacagggaagcattagcatgtccggttcctggggctgtttccggggggctggcagggtggcgtttggggatttccacgcctcagggagcatattccggccagccctgtggccacttcctcacgtagaggggaaggccagtgtgaggcagtgggggcagcaaagcgatgtctctccatgtgggggtgcaagtgcccaagtacagaaccccctttgcccaccactcaaaaccccgacactccagccagggcccacccctgggggattctggagataactgcaggacggcgctttccacccagatcccggaggcaggaaggacacagcttcagaggccccaacccgaggcccccactccccggaaagatgctgatgtccacaaagagacccgtggctctgaagcagcatcgggggcacccgccccaacctcccccaccaaatcctgtcgacagccagcctgggccgcccaaatgcacatcagactagaccctctctccattcacaaccatccagggctccccgctgcccctgcaacgaacacagcgcccctagcccgccccgccggccggtcccaccgcagggcgtccgtacgggctgctctctctgcctggcaaattcctcccctcatgctcccacggccccttcctctcaccctcagggctctgccccgacacgccctctgcggagaccttcactagaggtcccgctttggggcaacctggccctcgctgggtgtgccgtgaagccctgcccatgctccagagtgtgattttcaggccacccccaggaccccacgtctcccctatctgtcccgcccactgctgtgtcatcagcgagggtgacccgctcatccaggtcagcctgggatgtttctgctttgagcactcaaagccgcgggtcccaggaattgcccctcagtcctgggcaaaccacaatggccggtcaccctggtgctgggccctgcatacagcaagcgcctaatacctgcttaaatgaaagtcgtcgaggctcacaaggtgggtgggatccagtgagagccgggatcccgcaccacgccctctccagagcctcagtttcccccttatggattgactggagaaacggatgctcgagatccccacccacacacaggcccagctccaaccctgcgcctaaaaacaagccccacccagcccccagacccaggctccaggcgcgggagggacgaggggacgaggggctcaggggctcgggctcccaaggcaggtcacacgggcaacggcagctgatttcaggggtcttcaggctcgctgcccccgacccggcctgtgtggccctttccccattgtctccctcctttgctgccccagcctccctcgcccgcacactgtcttcaacagacccttgatctcctcactccacgagcgctggcaggaaggcggggtcctacctgaacctccgaactgcgccccggccagggaggcgggccggcccttcccgttggtgacaggcagcgggaacatctgcagggaggggaggggagacgtgagcggggcgggtggcaaaccaaaccctacagtcccgggttcaaacccaagctgggagcagagctggggacacccgggaacctgagactgcgctccatctaggcccggcccgtcctgctccgccccatcacagaccagaagactctgaggactcgcgtgccctcaagtgacgctgcaccctggacacccacgcccagagtgagaaaactccagacgatgaccccgctgtaccgccaggcagagtccctgccgctgaaaactcgctgttccccctgcctttgctctggggggaggggtatcccattaggcgaaggatacaacttatcagctcttgacagtgatacaaagttgtctttacgtttcagctctgaaaagtgagaggtttacactcaacaggtggacatgtggagagtccccggatgcctgagccctggctgactcctcgtttcctgtgtgtgcactggccccgcatggcaggccctggagcagggggtccctggagcggggggtagggcccagtgtccccctaccagggctgggtatgggtttgcttggcaaaaggggaagccgaggctcagacaggcagcaggtcgaggaagacacgggatggagccccgggcccggcaggaagctggaggggctggggagaggctgcaccccacagctgatccagctcctgggtgctaggggtgtgggactgccaccctccctcccgcccggctcacccgtacccagaacactaagtccctaaagattaacgggctcagcggcattaaccggaaaagccaacggcaacaaacccttttgccacagaaaaaaacacaacaagcctccgccctgccccaaggggctgcgttttaaggctcccatcggggcttaagtgatcaaagtggctggaatcagagccaggggctttctgaggagcagccaagatccccaacaccttccccagccagccaggaggcgaaggcacagcgcctgtggccacgatccacaggtccaaaggggacccaggaagcggggttgtcccccactccctggtcctgcagaaggggaaacggaggccgcattctcacctggccctggagaggaagaacggtcttgcgggtaggggtggcacccgcgctgaaggcagtgttcgccctggaccacaccccctcccgcaggctccggtgcacccagcctcccctggacccagacctccaagggccaacctctcatttgggaaacaaaggcctgctgtgggggacagccaactgcatttctatctgctttgtcccctaggacaccagggctgcaccaacgtgccacaggtcacatgggtaccgggctgtgtcctgtgggctctgcaggcctcatgagcagcccagaacagcccccgcaccccttggagcatcagtttcctcttctgagaaatggaccgagggctctggctgtgtgggacgtggtgaaacccaaaagcccatgggagtctcgcacgcggcagggcctggggagctcgcttccaacagcctcggtcctagggactcgctcccccttcattcctgaagcccctgactcaggcccagggactgcctgggacccaggcagggcatgtcagcccaggccagtgctggcgggtccttcgttcccgaccaaagctagcctgggtcagggcaggacaaaggcgcgctgggaacagcctgggttagcgttctccctcgtatttatttggagttccctgttctctcactttatacgcatctggtccagggaagtaagtgcttcccctaggacccagcctcggcaggggcagaaggcaggcatgcaggaacagagtggggatgcgggcagtcacaggggctgcctctgcctccccgtcctggccagggaggtggaactccacctctgggtaaagcccgaggggggacgcccggagaggacgggcacctcgccgctcccagcctgtttcctcatctgggaacggctccgacccgggatggggagacgtgctgagtggcttgaggtgaggagtcaggtcctggggctgaacctgtgccccctccccccaaacgctggtctgttccagcccagcggtctgtgacttgtcagtttaacaaaaaacaacccaactgcacctcgggttactcagccagggaagcaaaaataaaacggggcttaaaaataccagcatggcccttccggagccttggcccctccggcccttgggctgtttttttccgcagggtggccggtgttgtttcagtttggggacttttgtttttgacagacctcagtggcctgtgcctcataggcgggagggttaaattcagactgaaagtgccctcccccaacctgtttcaaccccaaacgctgccactgggcatggggggggggggggagcagaatttaaggacatctgtagacaggccagaagaaacaaaccaaggtccctgggcttctccaggaacccataacacatggccccactgtaccagcaggcaaaccgaggccccgggcctttacagcacccgtcagcggccggtaccccagggggctccggcattccagcctcactgcacctgcctgaactgtgtgacttctgaggaccagcaccctctgagcctccgttcacccaggtggagaatgggccgtacagggacagatccaaccacctaagactctgaagaagccgccccgccctccccaccgggcctgcctgctccgcagtgataaccgtggcagtcacaatggtggcgctgctgtctgctcggtggcccatgaattcccactcaatcccaatccagcctcctcctggcccaagctcggcttctggcagcttaacttcagcacccacgtgtgactaattaaccacacagtcagtttcatgcccgcatcctctgcccaccaggggagtcccgtatggggcaggttgtgtctgccctgttcacggagggtggtccgctcagcactgggcaccccctcctttacttctttgaggaaggatcttactctatcgcccaggaaggagtgcagtggcgcaatcacagctcactgcagcctcaacctccagggctcaagtgattctccttgcctcagcctcccaagtagctgggaccacaggcatctaccaccactcctagctaattttttgagttttgttttgtctttttgagaaatggggcctcactatgtttcctgggctggacttggaactcctggcctcaagcgatcctcccgcctcagcctcccaaagtgctggaatgacaggtgggaaccactgtgcccagcccccctcccatttactgaaacagggtctccagggtctcactgtcaaccagactggagtgcagtgatcttttacttacttttaatttttgtatctacaatgaggtaagcgaccctgatcaggcccattttacagatcagaagatcaaggccgcattttgcttacccagccaagctgggggcccaggaccatgcccctgaggactcagtttccccatctgtaaagcagtaggctgtagaatgctgcgtccgggcaaaagccccatagcacacgtgctgccgtgcgctgtcagcctcctgccagagagcggcccactcccccagccccaccggggcctcccatccaaacagctgaggctccatcgctgaagtattcagcaaacactctcccctgaaaaccttcccgtgaactgtggaggcaaaggggtgtcgggggctgggcgggggtcctggctcaccatgctgaagtccaggaggtcactgagctccttgtctgtgcccacaggcgccatcctctgcggctggttcattctcctggggccagggcgggcacctcaggcctggaaaccctgcttggtggatgtggggacagatggacagggagaaacagggaggggagaagagttgtgagtggtcaaagcacagagtgctaaaagccacctaaaaaaccctcaaccgccctggggtctgagttccagcagagccctgggggcacggggagccctgggagcaggcgcagggaagctggaattccagagtctaggtccctgcagagtcctccccagagaccacagggagtctgaaaaatggggggagggtgtgcaaatataaactccctaactcccccagggaacaccagggcatcaagttgccaagtttaaactgcacgcagggcagccagaacctctcctttctccaactctctcatttccaaccaaccccgggcttcctctgaggccccctacccccgggaaagggaggaacagcccgatcctaccccgccccgagggaaatttggtgattcccccctcccccagcagatggcacagcccgttgaagaccaggtcgcccccaaattcaacatgaaggaaatccacaagtcagaaaaccacgaaactcttttacaagcttcaagacttaaagtgccgggggtgggggggacgcgcatcctatgcagggaccagcaaagctttcctccaccctcaatctccctccccccaagaaaaccccaacagtattcaggaaagaaaaaaaaaacagccctagattgctttactgtcgcgatgtatccgggaattatttttaagcaaaactttgacaacatcccttgcctgccctccatgagcggggagagcgtctcaagaccagggtgctcccgcgtggtcccagggggctccattctaagatgggggatgggggatccacctgccaagacccattccacccccagaaaaaggtacagagaaaaatttccattccaaagaaatgcactccaggcccctccagtctcgactttccccaggggtccccaggtggggacgggggcagcccgggagacacctccgaggctgggggtggggaggagcctccgaggtcgagggagacccaacttcagaagcagagaaatcccctctttgtctgccaactggaggccgggtgtgaagcgggcgccccagcgcagcccctcccccgctcagtttttttcttttttggagggcgtgtgaaactgactttttttgaggactacgaaaccgcacttttttgtggggtagctgaaaccgattttaagacagacttagttgggggggtggcgagctaaaacgggcattctacgggagctggaagacttctggggcgtcccaaggactttgagagacttggagaatgtttgaagccactttgcacggcgccgaaggcggggggcgcgctggaacgcctttttcccggggggaggcggcccgggaagccggacccccctccccccgcagccggtgcaggcggtgcggcccgggagcctttgaagctcgcagcgcggccgccgcctcgccccgcattaacgcggagcagatgttacccgcgcgcccccccccggcccgcccggccccgaccagcgcctgcagcgcgcggcaccttccccgcgcagacaaaaggacgtccctcccgcgcgctccccaccccaaactccggcgcccgggccgggcccccctctacccgagaaagggggcgccccggggtccccgtgcgcccgggctgggggggacggtcctcgcgcctaagttgcacagcccgtccggcgccccccgcgcccccgcccggggctgcttaaagtttcccgaagtgcccggcccgacgggggcgacgcgggcctggcgagctccgggctcctccacgtcgccgcccccccggcgccgcgcgaagttggagaacaatgactcccgggccgcggggcgccccccgacaccgcccccgccccaacttcctccgcgcccccccccaacaagcgcgcgcggggcgggccggggttccctgggcacaaagcacgggggtaccgggcgcgccccccgccccccgccgggctcacctgctgggcgcggccgggcacgcggcgcgtgggggggggcggcggcatgaagcgggggggcccccccccggacaaaggtgcgtcgcggccgggcccccgagggtcgcgcgtgggcggcggcggcggcgcgcgtggcccgggcccctcccacccccgcgtggcccgtcccgcggggcccgtgcgcgcggccggccggggcgcccctggggcagcggcgtgcgcggtgcccgcggtgcccgccgccgcgtcggctccggcccgctacgcccgcagccgccgccgctgcctcatcttcctgcggcgggagacatgttccgccccccgcccgcgccgccccgccccgccccgtgcaggccccgcccctgccccgcccccgagtgccccgcccggcggcccacgcggatccctccgccacctccgggcggctcgggcccgaacgccctagctcggcctctcgagcaccctcgtgaggaccccgaatcccgtgaggtccagagcctgggagcggggacgcgcagaggaggcggtcgggccacggcgcggggagaaatcacggactatccccgtccgcggaagcacacacgagctgtgcgcttagtccatgacgcaagcgagtaaggcccgtgagattgaaagctaaggcagagcagtctggtcaatcggaagccgcgaaagtctgatgggcggggatcctagccattcgtggtgaggccccgcctcctttcttctcggccccgcccctcagcagaggcgggactctgcgagcgagaggccgcgagaggcggccggggtgggtcctggagttttgttctcaggttggcgtggccgcccgcgcggagccttctgcttggttatatttgcgttcctcgggccggccccgcgtgctgagtggtgcgagcgggtatcacggccccgagggggctacgtcagacccattttcccggcgggaaaaccgactctggctccggctctgggtcagagagccccgcggggagtctcagcggtgcctttgccgacttgagtctccgtctcggcatctgtgaatttggacctgactttggacagaactcaggccagatctggcttcctgattcttagtagtccgtgtctacattttagtaaaaagtgaccccgcctaggatcgggcgccgtggctcctgcctgtgatcccagcgctttgaaggaggccgaggcgggaagatcgcttgaggccaggagttcgagaacagcctgaacaacatagtgaaaccccccccacccacacccgtctctaaaaatatttaaaataatttaaaataataatttaaaaagttgaccggacgcggtggcccacgcttgtattcccagcactttgggaggccaaggcgggcagatcacctgaagtcaggagttcgagacctctctggccaacacggtgaaaccccatctctactaaaaatacaaaaattagccgggcatggtggcgggcacctgtagtcctagctactcgggaggctgaggcagcagaatcgctttcacccgaaaggcggaggttgcaatgagccgagagcacgccattgtactccagcctgggcaacaaggacgaaactccgtctcaaaataaataaataaataagtaaaataaaataaaaatacaaaaattagctgggcgtggtggcatacacctataatctcagctactcgggaagctgaggcaggagaatcgcttaaacccaggaggcagaggttgcagtgagcagagatcgcagcactgcactccaggctgggcgacagaacgaggctccgtctcaaaaaaaaaagtaaaataactaaacaaataaatgaaaataacacaatctcccagggctccctggggccccaaagggaaatttacactccactcccagcctgggaagatgccaccatctcgctggcccgcttggctccagccatcctgccctctggatggtccagaacttgctaagctcatccccaccccgggcctctacgtttgctttgtcctctacctgggaggcttttcccacccctatctggagcccctgagtcatcacagttcaatgctgcacctatgccaggccggcggggaggcggggccacaggggccccccaccaaagccacaagcccctcctgctatacacccaaactgggctgtccacagtccgaccctccgtgcccagagagttccacgtgccgcaggtctggggagagggctgtgggtcccagggtctgtgctgcaaatccctcatccctctccacctcactgtgacctcaggcaagttcgtgctactctccgggcctcggtttctccatctggacagtggaaggggggagtctggcacacagtaggtgctcacagctgatgcctgccttcctcagccgccccccacccccgcagaggcctctccggagccagggtctccaagcagctccaatcccaccccagcctcctcagcccccggcccttccttgtggcccagccctgaccccatgggtctgagggtgtctgtggccgggtctggctctccccattccagtgtagggagctcactgtgggccactccccacccacactcagggtccaagccatagtgtggcagccggagtcctcccgaggagcccttcagtttcacccacggaagggaagcaaccatccaatcacggacttcttcttcttcttcttcttcttcttcttcttcttattattattattattattttgagaaagagtctcgctctgttgcccaggctggagtgcagtggtgagatcacagctcactgcagccttgacctcctgggctcaaacgatcctcccgcctcagtttcccgagtagctgggaccacaggcacgcgccaccacacccagctaattttgtattttttgtagagacggggttctccctatgttgcccaggctggtcttgaactcctaggcacaagtgatcctcccgccttggcttcccagagtgctgggattacaggcgtgtgccactgcgccgtacaagactattcaattatcgggcactgacagcgaacggggccttgtgccgcgcatcgtagcactgtggacagtgatggactcagtccctgctgtcccggcaggatgacccatgagggaccccttgtctagtcctgaatgtggctctttcctgtgaggtcctcctgcctgtgtggttccacgtatcgtacagatgaggaaactgagactaggggtctcctccctgggccccagggcaccctggggctcgcgcctgccaggaggttccgctggtaaccacaagccaccattgttttccccaaggaggtcagtcctggggctgagtcactgggtggagcagcccgtgggggccccccacttggccaccacctctgcccagccccgaggcctgggtgctccctccagggccctggtacggggacaggcagcaagctatcctcctgactgtggcctttgttttgctctggggccgggcaggaggaggagcagggcctctgcacctgccgcctgttccctccacacctactgtgtgcgcccccgccaacatgaaccacgtatgtcagaaaaactgaggccaaggacaacttcccactagggagacacagaagcgaggggggcgaggggcggcgatggcgaggtttccagagacagacgcagtaggtgtgcaggccacagctgtccgcagagagactgggcttggattaggacttcggggccaccctccagatttctgtttccatttgtccctaaagtgggcacctttgacttctcccagggtatgaacacactcccccaacccccagcgccctccagcaggggcggagaagggagtggcggcccagcacttatcacccacgtcaggccctgggacaaacctcgctccggcgtccactgagcacgggcagctggggcgatcggtgtcgcctcccaaagtgggggcttcctgctcgagctcagacctccagtgaggggcctgatcccaacacgaccagatcaggaccaccccacagagccctgggctgggactcggccagggtagggcccattcccttattctccacaacttcgtttttattttattttagcagagatggggtgaggtggaaggatcgcttgagcccaggagtttgagaccagactggacaacacagcaagaccccatctcttaaaaaaaaatttttttttttagatgaaatctcactctgtcgtccaggctggagggcagtggtgccagctcagctcactacaacctccacctcctggggtcaagcgattctcctgcctcagcctcctgagtagctgggattataggtgcccactgccacgcctggctaatttttgtatttttttatagagacggggtttcaccctgtcgcccaggctggtctagaactcctggcctcaagcgatcttcctgccttggcctacccaaagtgatgggcttaccagcatgagccaccacacccggccccattcttcctgccttctgggaggaggcgtctccaggcttgctggttggacctgggcagggaagcctcctgagattgggagtgctaggggcttatgattgttctcccctagcggagggaggagattctggtgtgaaatggagcagtggggacacactccagttcctggggtctgatcacaagggttcctgactcctcgggcacttccagctatgaggacaccaaggaagggaagaggcttgtcggtgatcagacccctacccctccacccagacttatgggagccagagggccaggagagctgggcaggaggctctgaggttgacgggaatgggaacacagcctcacacctcctgctgtagggcattcaggggaagaaggaccatctcccacagggagtgggtcccctggggcagtgactcttgggctatgacctcaagatgcatgcggtcgacaggcagagagcggataccatgccaggcaggggaagctgagggacaaaggtactgaggtgggagggggtgtggggtgttcaaggaacggggcctgtgaggctggagcccagagaagaccagagaagaggagccaagatcagagagaggggcagggcctcctatgccacagggaggaattgggtcttcatggtgagaggactagggaaccatggtgggagtttgagcaagagacggacgtgatcacagggaccatgagttggggtggatctggggtacatttggaggataactgagggctctcccagggggtgggtatgaggggttagcagcctgcctactaggtgtggggttagggacctgggcctgtgaatggtggtatcgttctctgagtggggccagcgtgggtcaagggagaggcgtgaagggggaacaggaggctcatgtcccagggtggtgtccaggccccatgagacaaggcgggtcatggccaggaggggctgcgtgagagggggcaccagtgaagaaggcacagtccccagtcggggggagcccagctctggatgcagcctggcctccccgagccctccttctgtccgagccccccacgcagcccctctgcacctgccgggtgcccgtccaccccagggccagggccaactgccgaggatggtcccaccccctcttggccaggcgcccacagctcctgactcaggggcccccgggggcctgtcctgccacattccggggccgcccgtgcaaacacagggcgcctgcccatcaccccccatggggcattgtttggcccagttaccccgaggcgggggcagggcaggggacagggagcccagccagattctcagttcccgccacccatgcacctgcccacaggcagccctgctgacctgcacccgccttgacatggggggacggcgcctctgcagtgtaccctgggcacaatgggggcatctcccttcttcccgggggtcttcacctcccctgaactttgctcaaggcacagaggacgtcatcccattgttcagatggggaaaccgaggcaggactcaagtggcctcatgcctgaagctgagccaggctcccatccccggcccacctgtcctgtcccccaccgaccccacctcaccccgccaggctccttcacctgcacctggtgccttccagaaacgggggaggccactccaggctgtcagccctctggcacaaaggctgggaggtcagaagccatccagggacgccttgccacgctaagaaggttgggtttcattcgcgggtttggaggagccgagggggccacgtggtctcactgggggttgggaagggcatctgggagaccgaggtggaggccggtgacgtggctgtggagtgggatgcccaaggcaacaggaggggtggaaagagatgcctgttagacgggaaactgggggggcgcccctggggaaagacgacaaggatcctaggagggcggggagcacaggtgcccccaaccccaaggggtgagaactagactcaggaggagactcagggcttgggggctgcagggatggctgcctggagctgagcctgcaaagctggaacagggaggaagggtaactgagcagagggaacagcagaggcaaaagctacgagacgaggaaatgcaagttgttccctgggtttgggccgagggccagggggcgggggcgggtggcactgatggatgtgccacccacccccatccgggccatcctgtctggatccgggaccctgccctcgcccctccctccctccgtcagaccggccctgcactccacagacattgtatgtcttgctgctgcccagagcccgaaagtccctgcccacctccccgtctccgccactcctggttgtccctccaagcgcctgttggtttctgggcctgtttcctggctgtgtcctctcctggaacaactttcctctctttgtacctggctgtcttctcttcctcatccttccaccctcagcttgggggccacctcctccggggagccttccttgctttgtttgtttgtttgtttgtttgtttgtttgtttgtttgtttccagagacagagtttcgctcttgttgcccaggctggagtgcaatggtgccatcttggctcactgcaatctttgccccctgggttcaagcaattttcctgcctcagtctcctgagaagctggaattacaggtgcctgccaccacgcccagctaattttttgtgtttttattagagacggggtttcaccatgttggccaggctggtcttgaacttctctgacctcaggtgatccaccccccttggcctcccaaagttctgggattccaggtgtgggccactgtgcccggccttggtcggcagttttctaacagctgggggtggctgcgtgtgagacaggagagggtgagcaggaggtgctgggatcagaagaggctcagcaaaggttggccccacacccagcccccttgtccttttcaggcatagagaagatacaaaatccagaaccatgcaaggagaaaattcttcaaatttgaccacacaggccagacacggcagctcatgtctgtattcccagcactttgggaggccaaggcggcgggatcacttgaggccaggaggttgaggccaaccttggcaacatagcgagaccaccatctctacaaaaaaaatacaaaaattaggccgggcctggtggcatgtgcctgtagtcccggctactctggaggctgaggcaggaggatcacctgagtctggggaggttgaggctgcattgagccatggttgtgtgactgcactccagcctgggcaacagaacgagactcagactcaaaaaaaaaaatgttttttaggctgggtatgatggctcacgcctgttatcctagcgctttgggaggccgaggtgggcagatcacttgagatcaggagttcgagatcagcctggccaacatgatgaaatccactctgtactaaaaatacaaaaattagccgagcacagaggcaggcgcctgtaatccgagctacttggaggctgaggcaggagaattacttgaacctggaaggaagaggttgcagtgagccgagatcatgccactgcattccagcctgggacacaagaatgagactctgactcaaaaaaaaaaaaaaaaaagtttttcgactacataaaaattaaacacttttgtgtggtcacagactcacaatgaagttagatgagatgagaaagctagggagaaactatttgcaacatcataacagacaaagggtttgggctcttcgtatacaaagagttccaacaaatcaataaggaaaaaactcaaaaaaaaaaagaaaccatgcaaagaaatgagtgattaattcatacaggaaaaaattaaaatggccactggatacacagacgaataaaaaacctaaagtcactcttggtgaaaaagatacaaatgggccgggcgc[208 bp omitted]gcttgcagtgagccgagatggcgccactgcactccagcctgggtgacagagcaagactctgtctcaaaaaaaaaaaaaaaaaaccaaactaataaatctaataaaaatggtggcatgaccactgctcacccatgccaaggccgttttttaaaaacaagacaaaacgtgacggcatgagcagggctgtgcattagaacgtggtttgtggcacagaacacttgatttgaaaactgcccaagtgtccaacaacaagggctgtagaagaagattctgtcatggctgcactaggaacccgactgttgaccgtccagcaagtcaggttcccgtgcctgcttggagccaagagacgcctgaggccgcctctctgggggaatgaaatacaagttaaagacccgccatgccacttttggttgaagcttttgtaaaggaaaaaagcatattgaaaaagtgcaggaggaaatgccccaagggcttggtggttactctgggggtgggggacactttcagttcttactttatcttttttttttttttttttttcactctgtcgcccaggctggagtgcggtggcgcgatctcggctcactgcaagctccgcctcccgggttcacgccattctcctgcctcagcctcccgagtggctgggactacaggtgcccgccaccatgcccggctaattttttgtatttttagtacagacggggtttcaccgagttagccaggatggtctccatctgctgacctcgtgatccacccgccttggcctcctaaagtgctgggattacaggcgtgagccactgcgcccggcccttactttatcttttgaagaggcaggattagcttgagagtttacattggacattattttctcttttccttggttgaaaatgtttgttttgggggccgggagtggtggttcacgcctgtaatcccagcccttcgggaggtcaaagtgggaggattgcttgagtccaggagttcgagaccagcctgggcaacatagcaataccccatctctaccataaattaataaataaaattagccaggcatggtggtgtgcaactgtagtcccagctactagggaggctgaagtgggaggatcccttgagtccaggagttggaggctgcagtgagctatgattgtgccactgcactccagcctgggggatagaccgagaccttgcctcttaaaaaaaatttcattttgacaatatgcataaggccacatgcgtgaagctcagttggaatgtcacttgcaacatcataagaggcaaaggatttgggttcttcatatacaaagagttccaacaaatcaataagaaaaaactcaaaaagaaaaccatgtaaagaaatgaatgattaattcatacaagaagaaatgcaaatggccactggatacaaggccacagaatatttggaaggtgaggctgacaggagagctgctgtcctggagacattgaataaatactgccaggggccgggcacggtggctcacacctgtcatcccagcactttgggaggacaaggtgggccgatcatttcaggccaggagtttgagatcagcctggccagcatggcgaaacccccctctgctaaaaatacaaaaattagccaggcatggtggtgtgggcacctgtagtctcagctactcaggaagctgaggtgggagaatcgtttgaacccaggaggcagaggctgcagtgagctgagattgtgccacagcactctagcctgtgtgacagagtgagattccctctcaaaaaaaaaaaaaaaaaaaaaagactgccagcatccacttcatcttcatgttctaagatgatggtttatctttgtgtgtattttatgttttttagttttaattttttttttttaagagatggggtctcagctgggcgtggtggctcacgcctgtaatcacagcactttgggaggccgaggcaggtggatcataaggtcaagagatcgagagcatcttcgccaacatggtgaaacctcgtctctactaaaaatacaaaaaattagccgggcatggtggcgggcgcctgtagtcctagctactcgggaggctgaggcaggagaatcgcttgaacccgggaggtggaggttgcagtgagctgagatcgcgccattgcactccagcctgggtgacagaatgagactccatctcaaaaaaaaaaaaaaaaaattagctgggcgtggtgggcgggggtggggggcgcctgtaatcccagttactcaggaggctgaggtagcagaatcgcttgaaactggaaggcagaggttgcagt[131 bp omitted]atggctcactgtagcctcaaactcctgggatcaagccatcctccatccttagcctcccaagtagctgggactgcaggcatgtaccaccacacctggctaatttttctttattttgtttgtagagacgggatcttgctatgttgcccaggctggtctccaacctctggactcaagccatcctctcattttggccttccaaagtgttgggattacaggcatgagccaccatgcccggacccccgccaccccgctttttttttttttgagacggagttttgctcttgttgcccaggctggagtgcaatggcgtgatctcagctcactgcaacctccacctcccgggttcaatcgattctcctgcctcagcctccctggtagctgagattgcaggcgcccaccaccacgcccagctaattttgtatttttagtagagacggggtttctccatgttggtcaggctggtctcgaactcccaacctcaggtgatcagccccacctcggcctccgaaagtgctgggattacaggcatgagccactgtgccctggtcccggccgctttttaaaattaaagaatgtttagtttttcacctcaccatagatgctgcatgactgagattgcagaaccacagaacgggcgtgggtgggcttccaccggggcaccccctcctcctgcaggatccgcactgcccgggcatttccctgggggtggggaggcctcttgctgtcccagggttccctgggggaaacccctggtgtcctggggaggccccaccaggttgatcgtgagcttgagctcagggcaaggagcactgctcagcgagtccactgtggttgtggtcacacgatggtgtgagctctcatctgtcaaaggagtttaacaagagcacccaccagggtgagttcaatctgtccatcgaacgcaacaggcccaggccccggaggcttttagggcccatgaaaatgtctgtcttccttcctccctccctccttccctccctctctccctcccttcctcccttccttcttttctttctctctttctctctctttctttctcttctttcccttccctccctcccctcccccctcccctcccctccctccctctctctctgtctctttttctttctttctttctttcttcctttgttgcagagtcttgctctgttacccaggctgcagtgtgatggcacaatctcggctcgctgcaaactctgcctcccaggttcaagcaattcttctgcctcagcttcccaagtagctgagattacaggtgcccactaccatgcctggctaatttttgtatttttactagagatggggtttcaccatgttggtcaggctggtctcaaacccctgacctcaggtgatccacctgcttcagcctctcaaagtgctgggattacaggcatgaaccaccatatctggccaaaaatgttttaatttcttttaaaatcagggccgggcactgtgtggctcacacctgtaatcctaacactttgggaggctgaggcgggaagatcgcttgagcccaggagtttgagaccagcctgggcaatacagcgagacctcgtctcaaaaaaaaacaaaaacagaaacaaaaaaacaaaaagccaggcgtggtggcaggcacctgtattccagctactggagaggctcagacaggaggatggtttgagcccaagaggttgaggctgcagtgacccaagtttgtgtcactgcactgcaggatgggagacagagtgacaccctgtctcaggaagaaaaaaaaatttaatcagaagaaaaatgatgaataataattgttttccgatgaacaataataataacgaattaaggccgggcacagtggctctcacacctgtaatcccagcgctttgggaggc[134 bp omitted]gaggcaggagaatcgcttgaacctgggaggcagaagttgcagtgagccgagatcgtgccactgcactccagcctaggtgacagagtgagactccgtctcaaataataataataataaattaataataacaattctagtctcaattttacttttttttttcaatagaggaaaggactcaggatggcaaaagtgacttggtcccagacagccctacagggcagtcctgcccgggaaggagcaggtgctctctgctgctgaggcccctagcagaggctgggcctctgggtctcccagcaggtggcaggggtgtgagaaggggaggcccctttccagaggccagggacggccccaagggctgcccgggagatactgggtcatgtgaccccccggagccaccccctgaagcttggtctcaggttttctatttgcttcagactcttgttagtcccccccagctcctgctccatcaggcctggcctccttatcaccccggctgtctgggtgggggcatggccccctcgtaacctcagctacctgcagggcagggcagaaccccgggtctccggccggtccgtggccggtatgtacctcacgcatacagtctgcacactgggcagagacagacaagaaattcaccagccactcctcactcctgtcctgaccctgaacctgaccctgtcagggagacctgggctgagacgggatacagaactgggtacaggagcctgcagctagggctgagtcagggcaggcccaggggcacgggaggaatccaggggacacagcaaactggagaggggcgggaagcatgtgccctgcacctggccgggccctacttctcccttccttctcttcctcctcttcctcctcttttttttttttttttttttttgagaaggagtttcactcttgttgcccaggctggagtgcaatggcgtgatttcagctcaccgcagcctctgcctcccgggttcaagcaattctcctgcctcagtctcccgagcagctgggattacaggcacctgccaccacgcccggctaattttgtatttttagtagagacggggtttctccat[243 bp omitted]cctcagc[218 bp omitted]ttgctgtgttgcccaggctggtctcaaactcctggcctcaaggaatcctccacttcagtctcccacagcactgggatcccaggtgggaacg[133 bp omitted]ctcctgcctcagcctcccgagtagctgggactacaggcgcctgacac[182 bp omitted]ccctccatgtccggcctcccgagccccctctgcccacctccctccagctgcgctggccacctcctcgctgctgcttggacaccgttttctccctgtgacctcagggtctgtgcccaggatgtccctcggccgggagccgttcctccccactctcaggcccctttgccggtgtatcatcagtttatcgttcctcccactctcaggcccctgtttctcccccttgcgcctgtggggcttgcctggctctgtaaggggagccccgggcccagcctggccgccccacacctccagcatccatctggggcctgacacacagtaggtgctccataaatgcacaggctaagttggggggttccccatcttacaggtgaggaaactgaggctccgaagagggcggcctgacaggcatctgggagccccggcccaggcgaaggtatttcctcctggcccagggcgccgtggggtcccggggcagctggtggggccgccaaagggtggccgtgtgtgtggcggtggcagctggggctctggcagtgggggagggtgggcgggaggcagcagctggtggctggccccaggccagctggagcctgtgcagagggagggcgctgggtcggctcacgctgcctctgggtccccttctgagtccccctcagcctttctcggttggtctccatctctgtctttgtctctctgtctctgtctctttctgtctgtttctctctgtcttctttctctgtgctctctctgtgtcagcctccctgtctctgtctctttctcttccccatctctgtctgtctttttgtctctgtctctgtttctttctgtctctgcgtatctctttctgtccctctgtctctgtcagtctctctgtgtctgtgtgtgtctccatctctctctgtctccatctctctcgttgtctctctgtttctctttatctctttctgtctctctctgcctgtctctctgcctctctgtctctctgtttctctgcctgtctctctctctgcctctctgtatctctatctctctgtctctttgtctgtttctgttcttctctgtctccttctctgcttctctgtctccttctctttctgttcctatctcttgtctttttctctgtctctctctgcctctctgtctccctctgtctctgcctctctctccttccccttcacactggggactcccctgactggcccggacaggggctggttacactgctgcaccctctcttccagacctcccgctccaccccactccctgctgcctgcacccctgcgtcagccagcacctctgtgctggcatgaaggtctctacccaccgggaggagcccaggaccctctcacgggctggggaccctgtgcgcatcgctccccctgtgagcctgcatttccccacatgcagggtgtttgcagagccctctcagagcggtgctctggggaaccacagggcagaggtctcagcccgtcggggctcccagccagatggggaaggagaatttcgaaggaatcgccttacaggcatttgaaactctgcaggcagaggccaggggaatcccgggtggaggagcaggcagggtgagggccctgagagtccctccccgggttaggagcaggcagggtgagggccctgagagtccctccccgggccacccccagccacactcccccgtcacacagggaacctggcccagttgcccgtacccactggtcctggggagggcagctgggaggggctgtgtgtgcactaggggggcggagctgggactccccccaaggaccctcccttccgggatctacacccctgatcccccctcgccagcacatccacccaccaccctcgcagacaatagaattcatcactgtagaaacatcctctggggctggggcttaatcagttcctgatttgcatttttgcatattaatgacagcagagctgctaattttggcacatgattttaaaggtgcagtagctctgaaactacggaggcggtgagggggtgaggaccggggccttcctcacctggcctggggggtgctggccctcaggttacaggttacagggtctctgccctgggagcggcccctgcctctgggagctgcagggacccttggggattatggggtccctgcctctggggctcacaggaatcacagagtctctgccactctatctttctttccttcccttccctccctcccctccctcctctctctctctctctctctctctctctctctctctctctcgctctctctctctcgctctctctttcctttctttccttcccttccttccctcccttccctccctcccctctctctctttcctttctttcctttccttcccttccttccctccctcccctccctcccctctctctcctctctctcctctctctctctctctctttctttcctttctttcctttccttcctttccttccctccctcccctctctcctctctctctctctcgctctctctctctttcctttccttcctttccttccctccctcccctctctctctctctctttcctttcctttccttcctttcctccccttccttccctccctcccctctctctctctctctttcctttccttcccttccttcccttccttccctcccttccctcgcttctctctctctctctccttcccttccttcccttccctccctcccccttctctctctctctttcttttcttcccttccttccctccctcccctctctctctctttcctttccttcctttccttcccttccttccctcccttcccccccctttcctttccttcctttccttctcttccttcccttccttccctcccttccctccctcccctctctctctctctttcgttcctttccttcccttccttccctcccttccctccctcgtctctctctctctctctctctctttctttctttctttcgctcttgttgcccaagctggagtgcagtggcacaatcttggctcactgcaacctccgcctcccgggttcaagtgattctcctgcctcagcctcccgagtagctgggattacaggtgtgcgccactatgcccagctaatttttgtttgtttgttttttga[134 bp omitted]tatgcctggctaattttttgaatttttttttagtagagacggagtttcaccttgttagccaggatggtctcgaactcctgacctcaggcgatccgcctgcctcggcctcccaaagtgctgggattataggtgtgagccaccgcgcccggcccatgcccggctaactttttgtatttttagtagtttcaccatgttggcaaggctggtctcgaactcccgacctcaggagatccgcccacctcggcctcccaaaatgctgggattacaggcatgagccaccgcgcccggcccactctttttcttctcttttgaggcaggatcttgctctgttacccaagctggagtgcggtggtgcaatcatagctcactgcagcctccacctcctggctcaagtgatcctcccacctcccacgtggctcggaccacaggcgtgtaccaccacactagcctaattatttaaaattttgagtttgggtgccgtggctcacgcctgtaatcccagcacttcgggaggcagaggctggtgggtcacttgagatcaggagttggagaccagcctgaccaacataggggaaccccttctctactaaaaatacaaaaattagctgggcatggtggcacgtgcgtgtaatcccagctactcgggaggctgaggcagggagaatcgcttgaacccaggaagcagaggttgcagtgagccaagatcgctactgcactccagtctgggcgacagagtgaaactccgtctcaaaaataaataaataaatacatttttgtaggacaggggtcttgctatgtttctcaggctggtctcgaactcctgggcttaaatgagccttctgcctcagccacctaaagtgctgggattacaagtgtgagccatcacgccctgtctttgccactcttgcatttgggcatcaacgctggcattggccaggggaactgggattctggaattttctccaattggctccatcctgagaatcccatatttggaaagctgtgaattcaagttccgagtatcttaaaacctttggattttacccatcgaggctgaggatagtaagaatatttaccggccaagaatatcactttaaaaaaaaatcaaaacaaacctttgtattctctgtcctaggtagaccctaaatcctgcccttgtcctcacctcctgcgctcagatcggaaacctgggacctttgcctccaaaccccaccccacaatcccgcccaggctcaggactcagttcccttcgcccccaccgcgccctcccccggccctctgcacctgccgcgtcccgtacccggcctgctcttcttcaccattggtgccttttccttcaaccccacctccccagggaagccctcctggtgacttcaccacgcctgtgtgttcagttattctccctctccctgggaggtggggaaaccgaggcatagagcggcgaggctggtgctcacggccccccggggtcctccccagacccctcccctccctgtggtccgggggtgcatggggtggggcgcgggggcctcgctggtcctggggttcagtcgggcgcgcgtgctgccacctggtggccaatggggcaaggccgcgggtcctccccgggcgtcggggcccccaccccacggagcccaccctgcgctgggggaggtgggctcaggaaagccgcggcccccgctcgggacgccaggggtgggggacacggagcttcgccagactcccccaaactcgggcgcgtcatgggaagaatggagggagctggatgatgggggtcctgcgggctgccttccctgggtcttctggtgttgtccccgtcccgtccccttcttacccctgcgtgacgcccagaccgagggaggtgggactgggacccccttccagggacagagctgcagcgggtctggcgtccaccagggcgcgcccgcagcccagaaacccgcgggcgctccccacgtgcgcgctcacacgtgcatccgcggctaccccagtgcctcgcggctcgggctttttttaatttttattttatttttatttttttgagacggagtctcgctctgtcactcaggctggggtgcagtggcgcgatctcggctcacggcaacctccacctccctggttcaaacgattctcctgcctcagcctccagagtagctgggactacaggcacgtgccaccacgcccagctaatttttgtatttttagtagagctagggtttcaccatgttggtcaggctggtccccaactcctgaccttgtcatccgcccacctcggcctcccaaggtgctgggatgacaggcatgagccaccgcgcctggccggctcaggcattttgacccgaggcacacgtggtcctgtgtggttggtgtgtttctgaatgaacagtgttcacgtagattcaggtgtgccacacgtgatgtatacggggcatgcttatgcgtgttctcgcatgctcgtgtgcattctagcatgtgtgctcactcctatacacaggtttgcatgcgtgtgctggcatgtccgtgtgggtgcacacagaggctgtgacatgttcgctcgttgccacgagctcaggtgtgtttgtacatggtcagtcccgtttatacatgtgcacgcatgggcacgtatgtgccaggaaggttcacacatacaccttctcatgtgcggcctgctgtatctgcacatgtgtgtcctggtaaacgcgtgtgtttgcgtgttctggtgtgcttgcgcatgtttgtgtgtgtgcatgtgggcgcactcacagccacagcccatgctggcgtccctgagtgcaatggccccttatggactgggtcctacaggacacccctgagtcaggccccacataccccagggccctcccacagctccactgccccaaaccccctggccctgtgagccgatccctgcagccaaagggtccaggtcgcccccagtcagcctctccctggtctgccccaacccccagctctccactcgatctcccccacttcagtggctgcagcctcctgcacccgcaccctcttcctgctgtggtggcttctgggtccggtccccagtcagccccagctgctgcctgtgcccccaagagatgcagagctcttaggaggcagggccgtgtctggggtccacggctgcaccctgatctctggtatccagccggcacgcggtaaccaggtcagaagcctaaccgtccttcagccgggcccagcagctcccgtcgctatgggaaatccatgctcagctcccacaaacccagcagtcaccagctggcctcagccagaggttcccctgtcacagagcctgccaagcagagaccctcctgacactcactcaccccttcctctccagtggtggggctggatgagcgggccgcctccctcctctttaccgttccctctccacctggcaaactcctattcatcctgtggggccctggaacatgggccccacttctaggatacctaccccagtcctgggggtgaatggaccagaagctaccttggagagcagaccaggtgccagctcccaggctcccagccctcctgggtgaacttgggtggtggcagctgcgtctcatttccaagccaagcctgtagacaggagcccaatggcggttagtcaatggcagaccgccagggaggggtgaatgctggttcccaggctgtgtcaacatagccaaccagctgcccaggaggctctgatgtgaggaccgtacccactgctggtgcctccctccctccctccctccctctctgtctctccctcccctctgtccctccctcctttccttcatccctccctccctctgtccctctgtcactccctggccctggccacccacacagcccccaagggccatctccttggcaacagtggccacaaggtcgtctgctggatcaatctcctctcacccctgcagccccgaccccggacccggaaggtgacaaggaagtggggtcaggcctggcttcccgggagggacccagtgtgtgtaggacagggggggtcctttggctggagcaggggtggcaggactcagatagggtgagccggtccctgttgagagggtcagcagggccaaaggtccggcgagccctgggccacacactgcgtgtgaccctccctgggcctcagtttcccttgaggcacagcctctctgatgtctggactccgggtccagtccaggacagtcctttggagagcccagtgcgtgggagacacagtccctgggctgacggtgagaaaggacaacgctgccctcatcccaatttacacgccccgaagacactggcctcaggccgctgggccaggcagtggtcagggctgggga[197 bp omitted]ctgagg[139 bp omitted]agctcctgggcagtccaccactgctgcttctagaagattccaccattgccatttctggaagcttccatctttgtctctctgggcagctccgcattccagtcaccagggcagaaggaagaaggtgccctgaggtttttccctttggggaacaggtgggcaggctaggcagggagaggaccctccaagcacacgggagaagctggccccccctcctcggtggggcgctggggacacctcctcggggcggcacagcccgggtggggccaccaggcgtcccgcggcaggtcggtgagccggcccgggaggactggcatgctgaagacgtttgtatggattctggggcaggaggggcggcagggtcttggggggccagaggcgggagagggtgggatcgcctgcagaacctagctcaggctgctctcttcctttcccaagcctcagtttccccatccgggcaatgggggaagacgcagatagggaatagatttgcccttggcctccggggacctcgttttccggctgcggcactgcagctcagagaggtcaggctgcctgcctagggccacacagcctggaggtgggggccggccggggggcgcagacgcgcaaagcctgtccccacctcacggccccctccccgccggcccgggcggggctgctggccctttaagagcctcgttttggcgccgcctcggggttatcgatcgcagccttggaaacgcgattagattatcccggctgggaacggcagcctggcgggggccgcgcgggggaagcgcgccgcttcttgtaaacggttccccgaagggcgctgggccaggggcctgggagggggctcgttcccggtggggggggcgtcccggtgcggcgcggcccagcgctcccgggaacgggggatgggtaactggggcccccattttgtgttttgggtttggaaattgaggcgcagagaggggtgcgcctttctgcgaggccgcatacccaggaagacgggtttatttgttcagctgcatttattgagcgcctagtgtgtgccgcgcatgcgcggggcctattaatccgattagcgtttcgcataaaaatagagtcgcggatgatgatgatggtgataatgaatatccgtgctcctgactcgctcctgccgtgccaccaagcctttatgtgcgttgtctcagatcctcaccccaacacttagagtggcagaggccctggtcccattatacagatggggaaactgaggccggagctcaaacaagccagaggggccgaaccgggacaggcgggcccccggctcgctcctgggagcctccctagtagggtcaccgtagaaggaagggaagggatgggttgtggggggagttggggaccagcccctccatccactgtgaccccttctgcatccgccaaggcctctggtaggtgcctgagctgaagcagatgaacccttgagtgtgggaggaaaggatgggccagcggatgggtgggggcaggaggaggcccttccaccaccaacttctgacgcctcagcagaaaggccccgggcccatgagcttgagtcgggggctggtgggcagtggacaggaccagcttcccttccactccgcggtcgtttgctcccacatgtgaccccatgcccacggggggctggagggtgggcaagcacgcattcgttgaacacctgctgtgtgccaggccctgaaccgtccccctgccaattgtggcacagtaggagctggttccaatgcccacccacattcaccctgatgcacccccagagacccagtccagtggtcccacagtcaacgtttgttgattgaccaaatgacagtattttgcaatagcagtaaatacaaaccacttagactggacttcacttgggtctcaatgacccttcctgccccatcgtccctgaaaacctctatccttccatcgttcctaacattatggagcaccgactgtatgccccaactaccttcttcatcctctcagcagcctgtgaggcaggaaatatgactggcctagtctacagagggggaaactgaggatctggggggtggagggccttgtctgaggccgcagagcccagaagatgagattgtaaacccagacccaactgtgtctttttttttttttttctcagacagagtcttggtctgttgcccaggctggagtgcagtggcatgatctcagctctctgcaacctccatctcctgggttcaagcgattctcctgcctcagcctcctgagtagctgggactacaggcacccgcctccacacccggctagtttttgtatttttagtagagagggggggtttcaccatgttggccaggcttgtctcgaactcctgacctcaggtgatctgcccgcctcagcctcccaaagtgctgggatgacaggtgtgagccacccctcccagccaggcccatctgtgtctgaaccttaggttgtttcctaggaaaggggccggggcttgtacttctgaggctctgaatgggaggaaaccgaggcacagagctttcatgaggagacaggaggccaagactcaccctccaggttgcaggcagaaggaggggatgtggctggcttgagctacaaccacacggtaccacctgggacctcttcagtagggaccagctgggcgaggaccccgccatggtggggaggacaggagaggagggagctcaggagaggaatgtcagggaggtcacacttaggggtcgaggcaggtgattccttctgctggagagggttgccagggtgtctcagcctctgggcagggccagagcagggatggggggcccacccgtgtccccccagagtctcccctgcagccccccaatgccggacatccagaagggcgagcctgtgtctctctcctctgtctctctccttctctctctcttcatctctctttttccatctctgccactgtctccctctctatctctctctttccttctctccatctccatctctttctgtctctctccatgtctctgtctcttactctttcttaatctttgcctctttctctccatcactgtctccatctctgtctctctctgtctctattccatctctgccactgtctctccctctctccctttttgtctctctccatcttcatctctctccatctctgtctctctgtctctctctctctccctttgtgtctctctctccatcttcacctctctccatctctgtctctctgtctctctctctctccctttgtgtctctctctccatcttcacctctctccatctctgtctctctgtgtctctctcttccatctctgccactgtctctgtctccctctccctttgtgtctctctctttccatcttttctgtctccctatctccatgtctctgtctcttactctttcttcatctctatctcttcgaccctctctcctcgtcccccagtccctctctctgtctctgtctctctctttgtctctccatctctctccatgctcctatctctgtctctggccctctcctccccctgactccggagccacatctctccccttcccagctccctggccccctccccacccgcctcaggagccctcagctgtggtctctccaagtgcccccactcctgccgggaagggcctcatggggccctggtgggccttggtgctggacaggtagagacttgagaagctcctgggtgccccagctccaccctgtcccctgacccgagcaggccgcatggccttggccagccgctgccctctctgagccctgccctgcccttgaaatctgggagggtcggtgtctggcttggtccccccagcctaggacttcataaaagcccagcacccatcgaaggtggacaccctagagctgggagaagagaataaatgagccaaccaggaccagcccctcaggcctcacctcacttctgccagatccccgcagagaccccccatcttctggggaaactgaggcacaggcagggtacaggtgccggaggagggctaaaggcggctaaaggctcccgcgcccgggcgtccctctcgttgtctgcagggtgtggagatgcctcaggccaggggctggggctgggaccacctcccccatggcatccccccaggtgctcccatgctggttcctggccctctttccagccttgatgaaggcaggcgcaggaaggggctcggcctgcacgtccctgccaggagcatcgtcatgagcgtgaagggggcaggcgcctggtcagggtcacttcccgctggacagatggggaaactgaggccggggtctgtaggaggctttggtcctatccactcctcaacgcacttccctaaagccaactccatgcccgacccagcagtgatccggccaggtcctgtcctgccctccca[132 bp omitted]aaaccccatctctactgaaaatacaaaaaattagccgggcgtggtggcgggtgcctgtagtcccagctactcaggaggctgaggcagaatggtgtgaacccaggaggtggagcttgcagtgagccgagatcatgccagtgcaccccaaaaaaaaaggaggtgcattcaacaaaaggacccctaaatacagcagtatagcccagggtggggccggcaggcagagaagcgaccccccggggcagctgccaagggcccaacacgggctggggtcagggagggcttcctggaggaggggacacttgagctgtggcctgaggtgagcaggagctcagagagtagacagcacttctggtacaggaaggaggaggacagcgccctgaggccggaaccaggctgtggggaagcaagaccggacactggagctggaggctgggccatgcagggtcccgtgggctgcgttgaggacgtgggtctttttctggggtgcactgggagccacaggaggctgttgtgaacagagtcatgtttccttgtttctttttcccttcttttttttttttttagagataggattttgcaaattagccgggcatggtggcgcgtgcctgtaagcccagctactaaggaggctgaggcaggagaatcacttcaacctgggaagtggaggttgcagtgagccgagatcacgccgttgcactccagcctgggcaacagagaaagactcagtctaaaaaaaatttaaaaaaaaaaaaaaaaaagagagagagagatggggtcttcctatgttgcccagactggtcttgaactcctggactcaagtgatcctcccgtcttggcctcccaaagctctgggcactcttgtcacccaggctggagtgcaatggtgcagccttggctcactacatcctctgcctcccaggttcaagcagttctcctgcctcagcctcttgagtagctaggattacaggcatgcgccaccacgcctggctaatttttgtatctttagtagagatgggggtttcaccatgttggtcaggctggtctcgaactcctgacctcaggtgatcctcctgcctcagcctcccaaagtgctgggagtacaggcgtgagccaccgcacccgggcctaaagtcatgttttttaagccaccagccctggtggcttccagggaagggctgttggaggcagatggggaggctggaaggctgggttgaggctgagtcaagtccacgcagatggtctctgccaggcgactgtgtcagagatggagagacagggagagacaggcaaggtttgccttcctgcccagcttctgtgacccagggggcagctggacggctgggcaggggtctggggaccaaggggtgcagggcagtggccgtggccctgccggcccctccacagcagtaattaagggctcccggcgtccccgcggcgtgatgtatgtgtaccttaactaatcatttattaggtcactgatggttcgtcaatattaattcatttatttaaacaactcagctctgtaatgaagatgttgtctgagaggggaggctagttggtggcggggccaggatgcagaaagggggctcagatttgggtcttagggtggcctcaagaaatgtcagctgggcacggtggcacatgcctgtaatcccagcactttgggaggttgaggcgggaggaggacttgagcctaggagtttgagaacagtctgtgcaacattgagaccacatctctacaaaaaaaaaaaaagaaaaatttaaatacaggccaggcgcagtggcttactcctataatcccagcactttgggaggccgaggcgtgtggatcacatgaagccaggagttcaagaccagcctggtcaacatggtgaaaccccatctctactaaaaatacaaaaattagccaggtgtggttggcgtgcacctgtaatcccagctactcgggaggcggaggcaggagaatcacttgaacccaggaggcggaggttgcagcgagctgagatcacaccactgcactccagcctgggtgatagagcgagactctgtctcaaaaattaaaaaaaatatataaaataaattaaaaatacaaaaattttttttagctgggtgtggtagtgtgtgcctgtagtcccagctactggggaggctgagatggaaggatcacttgagcgtggaggttgaggctgcagtgagctatgattgcaccactgcactccagc[132 bp omitted]cgaaaccccatctctactaaaaatacaaaaaattagctgggcagggtggtgggctacttgggaggctgaggcaggagaattgcttgaaccagggaggcggaggttgcagtgagctgagatcgtgccactgcactccagcctgggcaacagagtgggactctgtctaaaaaataaaataaaataaaataaaataaaataataattaaataatcagatgacacccctaccctgctcaagaatagtccatggctccccagtgccctgaggagaaaacccacactcatccgaccctgggtgacctttgcggctccgtcttcactcactctccactcactgtctccctttgcccattgctactgctggaaacttcccagctccttcccgccacatggactctgcccttgctgtgccctcgcctgggagccgccgtcccgcatctcctcccggctccttcactccctggggtctcagcgtcagtgtcatctcccagaagcaccttctccaatctccccagtcccagggcccccagcacctccccgtcacccatgatcctgtttgatttccctccgagatcttcttggtgatgtacgggtttagctgtttatcgtctgtttttcctccatcttcaccttggtctgtcccagagagtagatggcactcagctgctgctgcccctccacagcagacatttctggggccccgtattttggctccttggcccccgttgctggttccctgcaggcgctgggtgcctcctccgggtctccgggttttttgtttcgtgtttgttttgagacggagtctcgctctgtcacccaggctggagtgcagtggcgcgatcttggctcactgtaagctccgcctcccgggttcacaccattctcctgcctcagcctcctgagtagctgggattacaggcacctgccaccactcctggctacttttttgtattttttg[134 bp omitted]ggttccaccatgttggccaggccggtctcgagctcctgacctcaggtgatctgcctgccttggcctcccgaagtgctgggagccaccacacctggccactgccaattttatagatgaggaaacagaggggcagcagttagcaggcttgcccagcaggca[134 bp omitted]tactaaaacacaaaaattagccaggagggatggtgcacacctgtaatcccagctactcgggaggctgaggcaggagaatcacttgaacccgggaggcagaggttgcagtgagctgagatcacaccactgcactccagcctgggcaacagagtgagactctgtctcaataataataataatagtagtaatattaataataaggctgggtgtggtggctcgcacttgtaatcccagcagtttggggggctgaggaaggaggatcgcttgagcccaggagttcgagaccagcctggacaacacagggaaaccccttgtctctacaaacaatacaacaaattagccgggcatgcatctgaactcccagctactctgaggcggaaggatcgcctgaacctgggagattgagggtgcagtgagctaagattgcaccactgcactccagcctgggccaccagagtgagaccctgtctcaaaataataacgataatggtaaaaacccttactacacggctgtcatgcgaactgtgtcagctgttcgttcattcattcattcattcattcactcggacacccaggtgtctgaatctctttgtgctcagaccccaccctggaggatttggagcctgagtgggtgcatcccgggcatggtctggacagagctggacaccggcattcccggctctgtgcagtcagggtgggatcagagggagagacctgagattggggaataggggcagaggggctgagggctgggcctgggggggatgggagggctgcagggagtggggcttggaggatgagtgggggacatcggctaagggaagcaggaagggacccctggcagagaccggcacgtgcaaaggctcggagatgtgaaggggcagccctagagactcctccgggctggagtgcagcggtgccgtctcagctcactgcagcctccacctcccggactcagcctcccgagtagctggaactacaggtgccaccatagcagggcaatatcttaacttttttgtggagatggggtctcaccatgttgcccaggctggacttgagctcctggcctcaagtgatagtcccgcctcggtctcccaaagttccagttagggattctgatctggggagggcactggggagccacgcagggtctcaagcagggggagggatgtgtcccaactggccttcaagagtgatcgctgcactctgagtacaagtgggagcattcgaagttccattagcaagctccggtttggcaagcatggattgagcacctactgtgtgcccgtctttggcctcagccttagaggccagatcacacgaaggcttgtgggcacgcagttgggggccagccccacaggcgagtccaggctttcaaatcaggaatccccctgccctgtctgcactggtggaaactgctgaagccgtcaggagctgggagccggctcttggtggcttgatagtgtgcgatgggccagtgtaggctccatcccaggctggacaccggtcagtccccagaggaagtatcgccgagtctgggggtggccctggcgcacgtgcagaacctctcagccactctgatggtgcttaaggcaggcggtcagggtattcaagttaacttcctcttaaacagacttaattagtgttctccagtcccacataaattaatcgtggccggccacggaggctgaaacacccgatcgatggggtggctcggcgacggccaggaattctccgtctcatccgtcaccacagcaccggctgataacggctcacggctttatcttctccaacctggcatgaccagccgggggaaggcggccagaggggtctgggggggtgctggctgctctctgagcctcagtttccacttctacaggatgggatcgtgctcccacaatagcagattggcaaaggggctggaaaacagctaataataacaacttggccaggcgcagtggctcacacctgtaattccagcactatgggaggctgaagtgggagaatctcttgagcccaggagttggagaccagcctgggcaacagagcaaaac[132 bp omitted]aaccctgtctctactaaaaatacaaaaattagccgggtgtggtggtgcatgcctgtaatctcagctactcaggaggctgaggcaggagaatcgcttgaaccagggaggcagaggttgcagtgaaccaagatcacgccattgcacttcaacctgggtgacagagtgagactccatctaaaagtaaataaataaataaaaaccaaaaaatatttacccaaacatggtggtacgtgcctgtagtcccagctacccaggagtctaaggtgggaagatcacttgaggccaggagtttgagaccagcctggacaacatagcaagaccccacctctacaaaaaaattaaaaaataattagcagaatttggtggtgcatgcctgtagtcccagctactctggaggctgaggttggaggactgcttgagcccaggagatagtgactgcagtgagccgtgatcgcaccactgcactacagcctgggcgacagagtgagactgtctctcaaaaacaaaacaaacaaacaagaaaaatagtgtaacaaccaccgcatagggtcatgtggctgaccccagtgctaagcatcatctaatttattttaactaattaattaatgatttatttatttgagacgagtttcactgttgttgcccaggctggagtgcaatggagccatctcagcttagaacaacctccgcctcccgggttcaagcaatgctcctgcctcaacctcctgagtagctgcaactacaggcatgagccaccacgcccagctaatttttatattttttggtagagacgaggtttcaccatgttgtccaggctggtctccaactcttggccttaagtgatccgtccacctcggcctcccagagtgctgggattccaggcgggagccaccgcgcctggccagtatcatttcctttaatccccacaagaggcctgcagggccctccattcttctctccttttccagcgttgagtgacccctgtgaggtcccaccaccggcaaatggctttgtctggatttgaatccagtgaggagccccagaacctcagcctcaagggtctgggattttgtggataagggctgcagtggtagagactgcatagctgctatatctcacccggcacgcaggagcggctgaggccaccctagaaggctctgcaccccagtcttcaggcatccatggatttgaaggcggggctaggggggattccaggaggtgccgggtgcaggcagttcacgggggacccctccggatgagcccagccaggctgatgttcgtgcccctggggtctggaggtcctccctccgagtgggaccgaaacctacattcgagactgtctatacaaaggtattgcgaatccctgctgcacaccaacccctgggctgggggcttcgggggctgtgggcacggtcgtcatcacagtggacatgacctcttttcatggaagagaaaaaccaatgaatgtccaatgagaaaaccacggagggggccgggcgcggtggctcatgcctgtaatcccagcactttggaaggccgaggtgggtggatcacctgaggtcaggaattcgagaccagcctgcccaacatttttggtagagtagtaccctgtctctactaaaatacaaaaaattagccgggcgtggtcatgggcgccagtaatcccagctacttgggaggctgaggcaggagaatcgcttgaacctgggaggcagaggttgcagtgagccgagatcgcaccactgcactccagcctgggtgacaagagcaaaacttcgtcacacacacacacacacacacacacacacacacacacacacacacaagaaaaccacggaggggtcagagagggcttcctggaggagggggcgtaagacctggaggaagaagggccaagagggaggggtggccaagggcctatcattgtccccaagaggagaagaagagtggggttgctatgaagcagttctagaaaacctatgatcagggattatgcctgtaatcctagcactttgtgaggccg[134 bp omitted]gaggcaggagaatcgcttgaacccgggaggctgaggttgcagtgagctgagattgtgccacggcactccagcatgggcgacagagccagactctgtctcaaaaaacacaaacaaaacaagagaaaacatgtgatcagaaaagcccccaaacctggagccactccggagctgggggagccgaatgggtgggatggatagggcgtggccgcatcggagggcgactgacgagggggcggggccaagtgagtgaggcttttgtggaggggcggggccaaacgcgctaactgcatgtggacgtcgtctataggggccggctttcccagggggcgtggcctgcgtgcgacagggccaaggtggggcccaggcaggttctcccctctttgaggaccaggcctaaagcagcaaagacccatccacccaaggagttgttgagaccccgtagacctttgctaggtgtggatgacctccagccctgtgggaccagaatggggtgggagagggagacccggagctgaggaggacccggagggtacctcggaagctctgcctgggatcggggagggctcctgaaggaggcggctttgaggatacagaggacagccagctgacaagacagagagggtgcatgtgcaaaggccttgagacaccagcagagtaaaagccagtttgcctggagcagggtgcatggtgcgtggaagagcctgggagaccaggtggagacggggacagggcggggatttgtgctttccggagaagtggagaagccatgggggcttctggcaggtggagatgggcaacgatgcagttcgtataaaaatataaaaattagggcagggtgcggtggctcacacctataattccgcactttgggaggccgaggcaggtggatcgcctgaggtcaggggtttgagaccagcctggccaacatggtgaaactccagactttgaaaagtcccttctggccgggcgcggtggctcacgcctgtaatctcagtactttgggaggctgaggcaggtggatcaactgaggtcaggggtttgagacccacctggccaacatggtgaaaccctgtctctactaaaaatacaaaaaattagccaggcgaggtggcaggtgcctgtaatcccagctactcgggagggtgaggcaggagaatcgcttgaagccgggaggcagatgttgcagtgagccgagatcacgccattgcactccagcctgggcgacagagccagactctgtctcaaaaaaaaaaaaaaaagtcatttcttggactacctggagggcaggaggggagacaaaaggaggtctgggagcaacgtccaggctgggggcaaggggtgctgaggactgcggagggctgcagaggtggggagaagtcgctagattagaaacagatttttttttttttttgagacagggtctcactctgtctcccaggctggagtgcagtggctcaaacacagctcactgtgccagcctcggcctcctgggcccaagtgatcctcccacctcagcctccagaggagctgggaccacaggtgcacaccgccaggtctgatttttttttttttttttaaggcagagcctcattctgtcacccaagctggagtgcgatggcgcgatctcggctcactgcaacctctgcctcccgggttcaagcgattctcctgcctcagcctcctgagtagttgggattacaggcatgcaccaccatgcccggctattttttttttttttagacggagtctggctctgtcaccaggctggagtgcaatggcatgatctcggctaactgcgacctctgtctccagggttcaagcgattctcctgcctcagcctcccaagtagctgggactacaggcatatgccaccatgcccagctaattttttgtatctttagtagagacggggtttcaccatgttggccaggctggtcttgaactcctgaccttgtgatccacctgcctcagcctcccaaagtgttggtactacatggtgagccaccatgcccagcctaatttttgtatttttagtagagtagagactgggtttctttttttttttttttttttgagacaaagtctcactctgtcgcccaggctgaaatgcagtggcgcgatctcggctcactacaagctccacctcccaggttcacgccattctcctgtctcagcctccggagtagctgggactacaggcgcccaccatca[187 bp omitted]tgacctcatgatcagcccgactcggtctcctaaagtgttgggattacaggtgtgagccaccgcgcccggcctgattttttattttttgttagagacgggggtctctctgtgttgctcaggctgatctcaaccccctggcctcaagcgatcctcccacctcagcctcccaacgtgctgggattacaggcgtgagccactgcgcccgacagacagttggcatttctttctggagccgcctggtaggaaggaggaggttggcagtttgaggacaattttgcatgagtttggaaattggtggtctgggggaggctgaggccggattccctgtaagccttctagaggcagccggacccgagttcagaccctctgtgggccttgggcaagctgcttggcttctcagagcctcagtttccccatctgtgagacaggtgatttgcagcgagggtgaaatgaggtggagttccaaagcagcaagtcagaggctgggtggcaagaacgaaatatactccgtgtcaaaggaaccactgctgcagtccacacccccgccctgctagaccctcagctcctgcagggagaggccggctgactgcgttctgtgtcgcttctccagagcctggatgtggaagggagggagggaggtcgcaaatgtccccttccctctaggggacctggcgtcacgccccatgagaaagccggccacagcaggccacgcccaaacacaggccacgcccacacaaggcagcgcccctccaccaaagccacgcccacctgccccgcccctcgtcagttgcctccacatgaggccacgccgcacccactcggttcccctctctgaactcatgggaatgacccaagcaggtcttgtctttgcgcctcagtttctccaacacggaagtggccacagctgatttccgtgcctctgtctgagctgggaaacgaccctcaccggcttggaggaagccttggtccccagcccggcccccatctccgcgccggcttgcactccccagggacggggagctcaccccctcccagagccctggagtggaggtttgatgcctgtcaggctggggcccggggatgggtctgggggaggcacttctgagaaaaggtggaaacggttctcagaaaccccgaaaccctgagggactcttttccttctcagaaatgctccccccgccccagactcgggaaaacgcctgttcgagaaagctgggctggctgtgggcaagaggcttggaccggcccctgtggagcccctgctccaggctgctgggaatgtcccccttctccagctgtgacctccaccccaggcaagtgtttcctgccacctgcctgtccccaaggggtccccatgttccccgcctgctgccgtccacctgccgtgtcctctgtccctccccacacggggcagggggccactgtgacctgaagcccgtcctccccaccagcttggccatgctagacacaggggcctccccagagtgtatcctccccaaaacagcccaggaacacaccacaccccacccccgaatttgcagccctggggcgggctgtggactcaccagctgatggcggcccctgacggtggtctcagccagggccctgccgggaagagagagactcatcctcagtcaggtgttaatccacctgtgcccctcacttgtcccaggtgcccatgagaaggaagggggccgtgggcagctgatggccaaaatgcaggggagccccagtgtcagggagggacacagcacctgccccgaaaatccaggcagtccttccggaaggagccggagcctctgtgtgtggagacgggtgggaggtccccagcctggcgcccggctgcccctgtgcctagggtgtcctagttcagaggtccccactgtccccgctttggggtctcccatagggtaacccccccatgaaggccctgcaaccctctcccctcccctggtgtgtcccccctccttctgaaatcactaatgggttacctcctctagcctcca[139 bp omitted]tatgctgaaaccccatctctgctaaaaatacaaaattttgagacgggggtctcactctgtcgcccacgctggagtgcaatggcacgatctcggctcactgcaacctccgcgtcccgggttcaagagattctcctgcctcagcctcctaagtagctgagattacaggcatgtgccaccatacccggctaatttggcatttttagcagagatggggtttcagcatgttttccaggcttgtctcaaacttctgaattcagacgatccgcccacctcggtctccaaagtgctggtattacaggtgtgagccactgcacctggtcagaatgccttattggaagaatcaatcttctttctttctttctttctttctttctttctttctttctttctttctttctttctttctttcttttttttttgggttggagtctcgctcttgtcgcccaggctggagtgcagtggcacgatctcagctcactgcaacttctgcctcccaggttcaagcaattctcctggctcggcctcctgagtagctgggattacaggcacccactgtcacaccctactaatttttgtatttttagtagagatggggtttcaccgcgttggccaggctggtctggaactcctgacctcaaatgatcctctcgccttggacttccaaagtgctgggataacaggcgtgagccaccgcgcccggcaagaagaatcaattttcagaatgtgggtgtgtcagacagatgcaagcagagtcctgtcctccaggtgggggtgcaggctgggtgcctgccctgcagctgctgtaataaatgacctcaaatttattggctcgaaacttcacagatttatgctttcatggttcaggagataagaaatcctaaaatcaaggcatgggcagggctggtccctcctggaggctccaggggagaacccatttcctgcctttcccagggtctagaggcgtccgcatccctcatcttagggccctttctcccccttcacagccacagtgctgccttttccagtctctctctgactccccaggctggggtgcagtggcaccatctcagctcactgcaacctctgcctcccaggttcaagcgattctcctggctcagcctcctgagtagctgggattacaggcacctgccaccacgcccagctaattttgtatttttagtagagacggggttacaccatgttggccaggctggtctcgaactcctgacctcaagtgatccacccaccttggcttcccaaagtgctgggatcacaagcatgagccactgctcctggccctcccgccgcctcttaaaagaaccctgtgaggacattgggcatcccccagataatccagtatgatctcctatccaaggtccttcatttagtcccatctgcagagtccctttagggatgtaaagtgacctatccataggtttcagggattaggattcgggggtgcacatctgtggggggccactattcagctcgcccagaggacacttccctacacaactcccccattcctgaccctaccttggagctgggagatgttcacagcctctgaggctgccaggaacactgcaaacccccagagattagatgatctccaacatattccaacgatttacttggcaagcatttgttaagtgcctgctgtctaccaggcccatctggctggtccggcttcatggatgtgtagcccagtggttcagggtttcatgtttggcttaatgctctggtgtctgtcaccatcttgatgcttttgctaatttgatctttgaacttgtgtgtgtgtgtgtgtgtgtgtgtgtgtgtgtgtgtgtttgtttgtttttaatgcagtctcgctctgtcacccaggctggagtgcagtggtgtgatctcagcttactgtaatctttgcctcccaggttcaagtgattcttctgcctcagcctcctaagtagctgggattacaggtgtgagccaccacacccggctaatttttttgtatttttagtagagatggggtttcaccacattggccaggctggcctcaaactcctgacctcgtgatctacccaccttggccacgcccagcctgaacttgtgttttataagtgaagtccagtggaacagtggagcgagcctgtgagcaagggaggtcctgaaaacgtgtgtgcttagctattccatgttggtctgtttgcacctagtggtcactatgcccaggggcacagagatccaggatcccacagctcatgagagttcagcgagacccaaaacgagtaccaggtgagtgtgtgagagagttggtagaataggcgtgcacgaagaggtaaaataaaggctgggcatggtggctcatacctgtaatcccagcgctttgggaggccaaggtgggaggattgcttgagcccaggagctcaagactagcctggaaaacatagcaagaccccatctctaaaaaacaaaaaaatgaacaaacaataagccgagcatggtggtacatgcctccagtcccagctactctgaaggctgatgctggagggttgcttgagcccaggaggttgaggtggcagtgagctgtgattgcaccactgcattcccaccttggcaacagagtgagatcccatctccaaaaaaaagaaaagaaaaggaaagaaaaagtgaaataaaaacaggttaattttgttcagtgtttcagttgttcccatcagaaccaaacacatatgctcatgcaatctccaaaacacaaatggcctaatttaggtgattctgtagacaagtcacatgttcttaaagaaccatagccaatatttccagaccaaatgatgaaattctttcaatagttgtatttaaacctggcattacatagcataaagatgaatggtcaaattcacaataataaattaaattttaaaaattttaggcttaaaaaaatttaaaagttttttaaaatttaaaaattaaaaaaattttaggtggttcacgcctttgggatcccagcactttgggaattcgaggtgagaggatcatgcgagcccaggagtttgagaccttcctggctaacacagtgagaccccatctctacaaaacaatgaaaacatcagtcaagtgtggtggatatggcttggctgtgtccccacccaaatctcatcttgcattgtagctcccacaattcccacgtgtcgtgggaggaaccctgtgggaggtgattgaattatgggggcgggtcttttctgcgctgttctcgtgatagtaaatgagtctcgcgagatctgatggtttaaaaacgggcgtttccctgcacaagctctctctgcctgctgccatccatgtaaggcatgacttgctcctccttgccttccaccatgattgtgaggcctcctcagacgtgtggaagtgtgagtccattaaacctcttttttttttcttttcttttcttttattgaggtggagtctcgctctgtcacccaggctgcagtgcagtggcgtaatcttggcttactgtaacctctacctcctgggttcacaccattctcctgcctcagcctcctgagtagctgggactacaggtgcacaccaccaggcccagctaattttttgtatttttagtagagatggggtttcacca[136 bp omitted]tatcagcagcatgaaaacaggctaatacagtggtggtgcatgcctgtggtgccagctacttgggaggctgagatgggaggatcacttgagcccaggaagtcaaggcctcagcaagctgtgattgcaccactgcactccagcctgggcgaaagtgagactctgtctaaaaaatatgtaaaataaactgtagaatgatgtggaatagcaaattgaagaaaactatgacaagttgagagagactgtagaagaaagaaaaaagctttaatgttagcactttgaatgatacttttttcttacttttttttttctttctttttctgagacagtctcactctgtcactcaggctggagtgcagtggtgcgatctcagctcgctgcaacctctgcctcccgggttcaagtgattctcctgcctcagcctcccaagtagctgggactacaggtgcgtgcaaccatgcccggctaatttttgtaattttagtagagatgaagtttcaccacgttagtcaggctggatggtcttgaactcctaacctggggtgatctaccagccttggcctcccaaagtacaggcatgagccacagcacctggccagtctgtctttataaataaagctttattgacacacagccacagccactcacttatatattgtctgtggtggttttactgccactgcagagctgagcagtcctgacagagactgtccaattcaaaaagccaaaaacattggctacctggtcccttatagaaagtttgcagagggccggg[175 bp omitted]gaggcaggagaatggcgtgaacccgggaggcggagctcgcagtgagctgagatcgcgccactgcactccagcctgggtgagagagtgagactccatctcaaaaaaaaaaaaaaaaaaagaaagaaagaaagaaagtttgcagagcctggtctcgagggtggagtccagaggtgaggctgggagaaggtgagggctgctggaacatggcagagcgggcgtattccagggagacttgggtgagactcgaggatgctggagaaggtaaccatcggggtggggtgcgaaggagggcagcaactctcctgggagatgggatggatggtggggccgtgggtgagatggggtcatgcagagaggacagaccaaggccccagtggaccctgggggaccctgtggctgtcttcagagcagcccccgaggtatcagtgctcacagcaacttgcggatacagcctagaaggccccatgcctcaaaaattcttagagtctgaggagctcaagaggctcacatcagcttcgggaagctctgtagggcggccaccaagctggactgagggatgggcgg[134 bp omitted]accaccccccacccccgccaacttatacaaaaatttcaaaaattcaggccggcacggtgctcatgccggtaatcccagcactttgggaggttgaggttggtggatcacctgaggtcaggagttcaagaccagcctgaccaacatggtaaaaccttgtctctactaaagatacaaaattagctgggcctgatagctcatgcctgtaatctcagctgcttgggaggctgaagcaagagaatcgcttccacccagcagatggaggttgcagtgagccgagatcgtgtcattgcactccagcctgggcaacaagagtgaaactccgtctcaaaaaacaaaacaaagcaaacaaaaaaattcaaaaattagccgagtgtggtgatgcacacctgtagtcccaactactttggaggctgaggtgggaggatcgtttgagtccaggaggttgaggctgcagtcagctatgattgcgccaccgcactccagcctgggtgacagagcgagaccctgtctcaagaaataagaagagaaggaagttggtggaggacattccacgccaaggagcccatgagccccggctggtggtgcacgtggagcatttgaagtcaccaccagtgacccggcccaggtgcctctgcagtgggacgggaggccggctttggtccagctcagacagagcttcagatgcccatcaagggatggggggctttgttgggaaccccatggtgccccctgggcctgcacatgtcgccccagtcccaaatatgctcccacctctggggccaggccactgaacgcccttcaggacactgtccaggggccagagtcaccatctgctgacccggcacccaaatcttccgcctcagaccctcctggccctccggttctccctctggctggccctcagccctccctggcacggaccacgtcttccgaggatgccccggaagatgcaccgtggataaggccatgcgatcaataggtccatcggccgccgggggggcggaagcgcggctcatcagggcgcctgctgtcccctccccaccctccaggaaggcggataaggcccggggaccctcttaagggacgcctggcacccgcccgccgcccggcactcctatctcccatggaaggacccagttcctgaattgccccatgggccgcgccgcaggcctgcaccgaagctcttaatagcctgggcctaatgttttattgttggttttaaaagtgtaattagttcaagtgtaaacagaaaaaacctgcttaattaagaatttttaaacaggggcataaagcgggagcgggagcattgacgaaccccaagctgcttcataacatcgatcggaagaggctccgagtggagggccgggcggggcgggcgccgcgggggcctgggagcctcccctggatgccatttgccgcccgggtgagggccccggggacctgctggtttacgatcggggtctcgggaccggtgcctaatgatttttatgcattaatggagatgacagttggccaagcaggctgtttaagaagcctttatggggggctgggagcccagtcctgtgaccctgggctgtctcgggggtgagaacccccgctgggagggaggccctggcgctcccaccctcctggggccggcttgctgggcggggtccgggtgttgccccctctccaagtggcacccaccgagggagtctcagcatcaccgtgtcacctcccggccgatccggcctgtctcggagtcaggacttgaatttccttcgaactgcaaggggctctgccttctacagagccggggcggggcggccctgacagtggggctgggggcgtgggctgtgccatgtgcctggcatggggcctcatgccggaatgaaccagagcccagggtatgctcagcctggccccggccgctggggaggggagggtggggccctgacccttcaccaggaggtggggaagaccccaggcggggcttaggggcaccctgggtttggagatttggctgctctaaacgtagagagcctggtggcccttggcacccatgaccctggagagcaaggcctgggggtcttggggggccacaggcgagcccaggcaggggctctgctccagcctcagtgccctggtctgtggcaggtctgggggttcctgcccttgtgagcccccaaggatgcatacacggaggggggctcagaaggcaccagcacgtggaagctggtggggtcctgctctccgcctgagcctcacagagccggggggttgctggtcccggtcacttcccacccccataccgacccctatgtggagatgggggacaggagctggcctggactttggtccttgccttccaggaggagcccaggctctggagttactgtgaccgcctcccttgtggccgagacgcggccccatttgacaggcgtggccaccaaggctggcccaggccccatggggacccaggtgtcggatccgactgtgcccggcttcaaggctccagcctggacctggcagggagccagagagggcccaggcttgaggccccagatggatgctctgtttccagaacaaagaggtgtcaagacccactgtgtgctgggggtcccacccccggccctggaacctggggcaggaaggatactccatgcacacctttcagggggtcagaggctgagacggtgcctggggcagacccgtgggttggggtgggggtgcccagatcttgacccccatccgtattcccaaggggcagagatgggacgtgactcctcctggcccccgccgccggcccgcaggtgttggggtctctgggctgggtctcccggcgttgtggctgctgccgagggagatgaggccaccctgatccccgcctgctccagccgcagcaaccaaggacgatcgatagccgaggcggccgctggggcttctctcctcttgctgtggggtgggggctgggtgcggggcagccagaactggggccagaggtgcagacgggcgggagcatctgcagcccaccggtgtccctggctcctgcgcgctctccgtctctctctatctctccgtgtctctctatgtctctgtgggtctctgtctctccctcttagtttccatttcttctgcctctgtctctgtgtctttttgtctctctgtctctctgtttctgcctctctctgattgtgtctcttcctatctctctatctctgtctttgactctctgtctctctctgcctctatctctgtttctgtctctctgtgtctctctctgtctctatctcttctctatttcactctctgcctctctctgtctgtgtctctgtctttttctgtctctttctctgtctctctgtgtctctctctgcctctatctttctctctgtctctgtgtctgtctctgtctctctgtctctgcctctctctctctctgtctctatctcattctctgtctctctgtctccctctctcctcctccctctctctctttgctcccccctctccatcacagaacccaaagcaggacctgagatctcccccagaaggtgccctggggagcccccatcacagctgaggacgggcagactcaggatcacccccgtggctcctggcccccgcccggccctggccgagtctcctgtccacccagcctttgttcaagtttgaaccttccccacacatcagaggcttcagatttccccggagaatccgatttgggccactccgacgctgcagctgcgtctgtattccgggcgggtcccggccccacagacttcccgccatggcccacttcctggcacgggttggttggcccctcaccggctgtgaggtggggtccctcgccagtgggcagatgaaagcagtctcccctcctttccccagccccccggccggaatccacagcctcaggtggtggaaagagcactgtgcggggggagtcacaccctcccaggttggagtgtccctcacagtgggaccctggagcctcagggctctcgtctgcaaagtgggggtgagtttgaggaaacaacaccatttcctggagacaggcaagggccccttaacggccaagacacttgcagtacaagaactaggaaactgggctgggcacggtcgctcacacctgtcatcccggcgctttgggaggcctaggtgggtggatcacc[133 bp omitted]gaggcaggagaatcgcttgaacccgggagatggaggttgcagtgagccgagaccacaccactgcaccccagcctgggcaacacagcgagactccatctcaaaaaaaaaaaaaaaacagaaaacaaacaaaataactaggaaactgtacttaaatggcaagaacaattgagtgaaggtggggtggaaattcaaatccagctgcagtatcagtattttccaaaatgtctacaattttcacttgttaccttgggcgaggcacagtggctcttgtctataaacccagctactcaggaggttgaagcgggaggatcgcttgagcctggaggttgaggctgcagtgagctgagatcacaccaccgcattccagtctgggcgacagacggaaaccctgtatctaaagagaagagaagagaagagaagagaagagaagagaagagaagagaagagaagagaagagaagaagaggaagagaagagaagagaagagaagagaagagaagagaagagaagagaagagaagagaagagaagagaaaagagaagagaagagaagaagacaccacaggccaggcgcagtggctcatgcgtataatcacagcgctttgggaggccaaggtgggagaattgcttgagctcaggagttcgagaccaccctggccaacgtagcaaggccccatctccagaagttttgttttgtttttttttttttttttgagacggagtctcattctgttcgcccaggctggagtgcagtggcatgatctcggctcattgcaacctctgcctcccgggttcaagcgattctcctgcctcagcctcccgagtagatgggattaaaggcgctcgccaccatgcccagctaatttttgtatttt[132 bp omitted]acaatgagcatccttggacatgaatctcttacactctctgaagtttttcttcaggacaaattcatcctggagttgcttgtcaagagaccataaaacaaatagtaaggcttttgatacattttatcaaattatctctgaaacttcataaaatacatatccttccattgtacatcagcctgttcatttactctcatccatgccaataatgggagttgttatatatatataatatataatattatgtatatcacatattatatatagtatatataatataattatatataataaatatattaaaaattatatagtttatataattatataatatataaatatatatttcatatataaatatatgtatttatatataaatgtatatttcatatataaatatatgtatttatatataaatgtatatttcatatataaatatatgtatttatatatataaatacatatatttaaatatatatatttttagacggagtcttgctctgtcgcccaggctggagtgcagtggtgtgatctcagctcactgcaagctgcgcctcccaggttcatgccattctcctgcctcagcctcccgagtagctgggactacaggcgcccgccaccatgcctggctaattttttgtatttttaatagagacggggtttcaccgtgttagccaggatggtctcaatctcctgacctcgtgatccactcgcctcggccttccgcccacctcagtctctcaaagtgctgggattacaggcatgagccaccgtgcccagccccaggagttgttatattttaaaaatcaaggtatatcatctagcaagtctacttctagatctgtgtccaaaatagttgaaaagaggtgtttaaacaaatacatggctgggcacggtggctcacacctgtaatcccagcactttgggaggctgaggtgggcggatcacaaggtcaggagattgagaccattcaggctaacacggtgaaaccccatctgtactaaaaatagaaaaattagccgggagtggtggcgggtgcctgtagtcccagctacttgggaggagaatggcgtgaacccgggaggtggagcttgcagtgagccgagatcatgccactgcactccagcctgggtgacagagcaagactccatctctaaataaataaataaataaataaataaacataaatatatttgtttgtaaatatcaatatattaataaataatatcaataaatggttggtggatgaatggaagagatggattgatagatcagtgggtaggcagtgtatggatgaatggttggatgcgtgtatggatgaatgatcacaggaatagatggatgaatgggtgtacagatgaatggaagaatggatggacagatgaatggacggatgaatttatggaaggtgtattataatagatgatggatgtatagatggaaaaattgatgataggtggatagatgaatgaatggatggataggcgaatggatgagtctatagatggatgatgaatgtatggtggcagtacggacggacagatcaatggacagatggatggatagtgaatgtatggtgggagtatggatggacagatcaatggacggatggatgggtagacagttgggtaatagtgggtggatggatggtgtcttagtctgtttgtgttgctacaaaggaatgcctaagtctgggtaattaatttttttaaagaagaggct[131 bp omitted]cctcagcctccccagcagctgggactacaggcacccgccaccatacctggctaatttttttgtatttttaatggagacgcggttt[139 bp omitted]atatcttcttctgatgagggcttcaggaagcttccactcaaggcaggaagcctccctgtgcagattacatggtgagagagagaaggaagatgccaggcgcttttcaacaatgagttctggcagaaaataagagtgagaactcactcctgtgagaatggcacaaagccattaatgacaaatccctcccaccagaccccaccttcaatgttggggatcaaatttcaacatgagacttgggaccaaacaaatcatatccaaaccatagcagatggatgagtgggtgggtgatggatggagggagggagggaggaagggatgaatgggtggatggacgacagaatggatggatggataggtagatggatggatgaatgggtgggcaggtggataggtggatgagtggatgggtagatgagtggatggatgggtgggtagatgagtgggtggatggatggatggatggatggatggatggatgggtcaatgggtggatgggtggatggatggatgggcacatgggaggatagatggatggatggacggatgggtcaataattgggtggatggatggatagagaaatggatgggtcaatggatggatgggtgggtggatggatggatggatggatggatggatggatagagaaatggatgggtcaatggatggatgggtgggtggatggatggatggatggatggatggatggatggatggatggatatgtgaatggatggatgaatggatggatgagtgggtgggtggctggatagatggatggatgggcaggtatatgtgtgggtggatggatgggtgggtggatggatggatggatgggcaggtgcatgtgtgggtggatggatgggtgggtggatggatggatggatgggcaggtgcatgtgtagatggatggatgggtggatggatgtgtgaatggatggatgagtgggtgggtgggtggacagatggatggatgggcaggtgcatgtgtgggtggatggatggatggatgaatggatggattaatggatggatggatggatgagtggatgggtgcatggataaggatacacatggatgggtgaggagatgaatagacaggtagttgggcaattgtccctgtgagtcccgcatcaatgggaatgcatgccaccccttccaagggcctcttggctcacaggtgttgcacttccaggattgaatgcagccatctgccactccctggatcccagtctccctgcacagactcatcctgggggaggggacacagagtccacgttgctgcccctcccatgctagcctgcaaacctcctccccagcaagagcagatccaggagccacgaatacggtggaggatgcaaaacggtaattaatctgtggtgggaggggggtgttaataccttaaagacacggggacacactggcagctcctaccaattagtgacctaaccctgccagtgtgctctccgcggtgtggccgagttgattactctaattaattttgcatcgacctacatggatctgctgggagagggctgatcggcatgggagacagatgctgccaacccgtagcacccccctcattgcccagtccacaaggtcaaacgccatcccacctggcctcccgggccctgggaaggtggggtcgctcccgactctccaggacacacaccaagacctgcctccctcccatcctcaaaaagcagaggggggccgggcgcggcggctcatgcctgtaatcccagcactttgggaggccaaggtgggtggatcacctgaggtcaggagttcaagaccagcctggccaacatggtgaaaccccatctctactgaaaaatacaaaaattagccgggcgtggtggcgggcacctgtcatcccagctacttgggaggctgaggcagaagaatcacttgcacctgggaggcggaggttgcagtgagccgagattgcgccattgcactccatcctgggtgacagagcaagactctgtctcaaaaaaaaaaaaagaaagaaagaaagaaaagaaaagaaaagcagaggcgggtacagttggacaacccacactcactcccgccttggtgtccttgtccagcagtggcagggagggctgggagcagagcgccttccagggccaacagacacccctgaattggtcttgatgtcatttcaacctgagaatgaacagcagtgatggaccaggtgtggtggttcatacctgtgatcccagcactttggggaggccaaggtgggaggatcgcttgagcccagaagtcgaggctgcagtgagccgtgattgcaccactgcactccagcctggacaatagagcaagaccctgtctcaaaataaataaataaataaaagacaatagcagtgatgggggcgtcagatgggagagaatggaggcggcatgaactagatgcttacagttcttgaggcttccctgtcttggcttttaccacagcccaggctaaccttaccatgcatgggggagctgccctacatcccaaggtgtattaatttcctattcctgccataacaaattaccacaaac[143 bp omitted]tctactaaaaatacaaaaaaaaaaaaaaattagccaggagtggtggcgggcgcctgtaatcccagctagtcaggaggctgaggcaggagaattgc[134 bp omitted]aggtcagaattctgcaataggccttactgagctaaaatcaaggtgtgggcagcactgggtcctcccagaggctccaggggagaacctgtttcccacacccctcagctgggggccccttcctccacctccacagccagcagcacagcctcctccagtctctgattgtcaccttcctgcctccttccaggagggccctgtgatgacgttggggccccggataaccccggatcacctcccattccaagttccttaacccaatcccacctgtaaagtccctttggccatgtgaggtgacaggtgacatatccgcaggtcctggaggttaggacgtagactttggggaggggagttactattctgctgaccacacaggagcatcttcctactgaggcaagtgatccccaactcatgttcagagctggatacagccgcacctgaatgcaatgttaattttattattattttattttattttattttatgtttgagacaggctctcactctgtcacccaggctggagtgcagtggcatgatctcggctcactgcaacttctgcctcctgggttcaagcgattctcctgcctcagcctcccgagtagctgggattacaggcacctgccaccatactcagctaatttttatatttttagtagagacggggtttcaccatgttggtcaagctggtcttgaactcctgacttcaagtgatccacctgcctaggcctcccaaagtgctggagttacaggcgtgagccatcgcgcctggccgtgaatgcaccgtttaacttgaactaacccatcctgagacaacagcctggggaccaagaatctctcccggcttttcccaacaccccagttccccgccccgttttctccattaccagatgaatgatgaggaaggactacagtgttgagttgaactacagacaagattttgttgtttacagctaggtgcatgttcatatatacatacacctttgtaatccccatccaaaaccaagatctgaaacattttctttaccccagaaggcccccttgttcccctaccagtctccaccccctggggtaatcactgccctgacttccatcattaagaactggttggccgggcgcggtggctcacgcctgtaatcccagtactggggaagccgagatgggcggatcacctgaggtcgtaagttctagacaagcctggccaacatggtgaaacctcatctctactaaaaatacaaaaattagctgggtgtggtggtgcacgcctgtaatcccagctacttgggaggctgaggtaggagaatcacttgaactcggggggcagaggttttggtaagccgagatcatgccactgccctccagtctgggcaacagagcgagactccatctcaaaaaaaaaaaaaaaaaaaaaaaaaaaaaagaactggttataacatctgctctggaaattcatcagaatggaatttatgcatgttcagttgtgtctgctccttttatttaagaatatgtttgagagattcgtccgtgatactggatgtttcgatgcttgtagttatttattgttctgtagcattctattatatgaagatacaaccactgggtctaccttgagcaaatctgctatgaacaatcttttttttttttcttttttgagacaacatctcactctgttccccaggctggagcacagtggcacaatcatggctcactgcaacctcgacctcccgggctcaagcaatcctcctgcctcagtctcccaagtagctgggactacaggcatgcaccaccatgcctggctaactaaaaaaagattttttttttttagagacagggtctcgctatgttgtccaggctggtcttgaactcctgagcacacgtgatctcctgaggagatgtctctgcaaa[151 bp omitted]ctactgaaaatattaaaaaaaattacccgggtgtggtggcgggcgcctgtagtcccagctactctggagactgaggcagaagaatggcatgaacccggga[137 bp omitted]acaattgaaggacaaaaaagaacgtggaagaaatggagagacatcccaactgccaggtgaaatggccaaataatgttaaaatgtcaatttcctctatgtgaatccatacatctttatttcaataccaatcaaaattccaatctgacttttgttcagagtgaaggagaaccgaacacaattattttaaaattcatatgaaagaatatacatttcagactcaccaggaatttttttttaagaaaagagtagaggaagggcatttgtttttgtaagaagttgaaatgtattgtaaaatgacaataattataaagttacaatatcgtttacctaaaaactaatcaaagtgtatattaacttagagtggaattgaggcgtctttccctttttggcgg[142 bp omitted]catggtgaaaccctatctctattaaaaaacacaaaaattagccgagcatggtggtgggtgcctgaatcctacctactcgggaggctgaggcaggagaatcgcttgaacccgggccgagatcgctccattgcactccagcctgggcgacagagcaagactctgtctcaaaaaaacaaacaacaaaaaaagaatataataaagaagctggggacagtggtgcacacctgtaactgcagctactcaggaggctgaggcgggaggatccctagagccagggagttcaaggctgcagtgagctctgattgcaccattgtactccagcctgggcaacagatcaagaccctatctttacaaaaaagtagagactctgtctcaaaaaaaaaaaaaagaaagaaaaaatatatataaaataacgtgggttgtgtattccagtatgtcaaagaaaatctatttctcagaatctaaaatctctctcacaactataaagagatatttatataatggtcattgcagtattctttgactagtttttttttttaaattggcaataatctaaatgtctgtattaatcagggtccctgctatggtaaattgattgcaaaactggtctcaattcttcatgctgtcccggcgcggtggctcaagcctgtaatcccagcactttggagggccaaggcaggtggataacttgaggccaggagttcgagaccagcctggtgaacaaggcaaaaccctgcccgtactaaaaatgcaaaaattagccaggtgtggtagcaggtgtctatagttagtcccagctacttgggaggctgaggcagaagaatggcgtgaacccgggaggcagaggttgcagtgagccaagatcgagtcattgcactccagcctgggcgacagagtgagactccgtctcaaaaaaaaaaaaaaaaaaaaaagtttaataaagagggttgctttattttattttatttattttttatttatttatttttttcagacggagtttcgctcttgttgcccaggctggagtgcaatggtgagatctcggcccactacaacctccacctcccaggttcaagcaattctcctgcctcagcctcctgagtagctgggattacaggtgcatgccaccacacccagctcgtgtttttatttttatttattttattttatttatgtatttatttttgagatggagcctggctctgtcacccaggctggatctcagctgcactggcaggatctcagctcactacaaactcctcctccccggttcaagctattctcctgcctcagcctcccgagtagctgggattacaggcatgcaccaccatgcccagctgatttcatatttttagtagagacaaggtttcaccatgttggccaagctggtcttgaactcctgacctcaggtgatctgcccgcctcagcttcccaaagtgctgggattacaggcatgagacaccgtgcctggctcctatttattttgttgaaacagggtctcactacattggccaggctggtcttgaactcctgggctcaagccatcctcctgcctcagcctcccaaagtgctgggatcacaggtgtgagccaccacacctgttcctataaagaagatttttttaaaaagggctgggtgcggtggctcacgcctgtaatcccagccctttgggaggccaaggcgggtggatcacaaggtcaggagttcgagaccagcctgaccaacatggtgaaaccccatctctactaaaaatacaaaaattagctgggtgtggtggcatgcacctgtaatcccagctactcaggaggctgaggcaggagaatctcttgaacccaggagacggaggttgcagtgagccgagattgtgccactgcactccagcctgggcgacagagcaagactccatctcaaaaaaaataaaaaaattaaaataaataaatttttgaaagatgtagaggccttgagaaacaagacgaatggtgcagaatctccaggctaggaacatgtgggagccgtgagcatcagagactgaaggggttcagggagacagtggccacgggaacttctcctcccactctccaatgtcctataagaattgtttgttggtcaaacccagctggaaaccagagagcaaggaaaccccacgggtcagcctccctgggcacagagcagggccctggggagaaaatggaatttaaccagctcagtgtttatcaatacaagaatggttacattctcaacagagcatcagcatgtgcacatggggtatataaagccattaacagtccaggcatcaaggctcacacctgcaattccagcacttgaggaggctgaggtgggaggatcccttgtgtcaggagttagagacgagcctgggcaacacagtaagaccctgtctctacaaaaagtacaaaaattacctgggcatggtagtgtgtgcctataatcccagatagtctaaggaggctgagttgggaggatggcttgagcccaggagtttgagaccagactgggcaatatagcaagaccccatctcaaatattttttgtttttgtttttagatgacatcttgctctgtcgtccaggctggagtgcagtgatgccatctcagctcactgcaaactccacctcctgggctcaagtgattttcctgcctcagcctcctgagtagctgggattacaggtgcctgctgccacgcctagccaatttttgtattttttttggagatggggtttcaccatgttggccaagctggtctcaaactgttgacttcaagtaatccacctgcctcatcctcccaaagtgctgggattacaggcatgagc[309 bp omitted]tggcgggtgcctgtagtcccaactacttgggaggctgaggcaagagaatggcgtgaatccgggaggcggagcttgcagtgagccgagatcacccccactgcactccagcctgggcaacagagcaagactccgtctcaaaaataaataaataaataaataaataaataaaaatacaaaaattatccgtgtgtggtgatgcgtgccttaatcccacctactccggaggctgaggcaggagaatcgcttgaacccaggaggcggaggttgcagtgagcagagattgcgccactgcactccagcctgggcaacaagagtgaaactccatctccaaaaacaaaaaacaaaacaaaacaaaaaacaaaaagggatgttcatatctctaagtgcagctacatttttaaaagcctaaattattatgaatcaaaataagagaggtatcaacgccatgtaggagcgtggaacagaaaaagaacattcctgaaaagc[143 bp omitted]cgaaaccccatgtctactaaaaatacgaaaattagccggacatagtggcacattcctgtaatcccagctactcaggaggctgaggcaggagaatcgcttgaacctgggaggcggaggttgcagtgagccaagatcacaccattgcactccagcctgggcaacaggagcgaaactccgtctcaaaaaaaaataaataaataaaaaataaaaaaagaactgaaattaattatcaatgatgacattttcttcattttactttttaatattttctaattagtttttcagtcagaaagaaagaacggccaaccatgtacggcaggtcacagataatatgcaaagccatttctgtaaacgtctttaatatttatgtacaattattttgcacgtatgtgcatgtttacaggcaagacacttccaaagctttctctctggaacagtgagattgataattttttgttgtggtggttgatggtctccattttactacagttttaccacccaagacacgcattgtttgtgtaataaaaaataataactagatttatttttctacctccttcacttcccctgtggcctctctcgaatttgcccgacaacctttcccaacacccatgataattgatccttaatcaaatattcaaatgggtgcttcaaggaaaggcacggtgctttggcaatttggatgataaataatatttcttcgctttgtcccccccacgctgcttctccctccctagtccccctctttttgcagcccaaccccgacgtcgccccccgccccactagaatctcgcaaatatcttttggttttaagagttccctggggaagccttgttctaaatgaggtgtaaaaatctaagcggcacaaaaaaaaaaaatagtgcgaggttggaatcaatattctcttcacagctccatcgattaacaaccatattcttcatttattaattatgaagggggatttcagagcctccgtctccttctttcgtggtaacatggcggcttcccctcctccctgcctcccccaggtctggggcctgtggtacccagggctcagcatccccggggccaggggaagagggagggaagtgggcgttctgcccccactggcaggtccagccaggagcagagagctctgtctggctttggaatctgcctcaacgcaaaggagtctagttctccgttcccgtgctggctttgccatctgtctctttagaagacaagctccatggccgggtgtggtggctcacgcctgtcatcccagcactttgggaggccgaggcaggtggatcatctgaggtcaggagtttgaaaccagcctggccaacatggtgaaaccccgtctctgctaaaaatacaaaaaattagtcaggtgtggtggtgcgcacctgcaatcccagctactcgggaggctgaggtaggagaatcgcttgaacccaggaaggcagaggttgcagtgagccgagatgctgccactgcactccagcctgggcaacagagtgagactctgtctcaaaaaaaaaaaaaaaagggggagataagctccatgtgggaccttgtttgctttccccagctgtgtttctgactctgggcgcacgtgctctatgaaactgtgctgagtgagtgataagacagtggcagaatcacatacacaagagacgggaaggaaagagtggagttcaaaagctggctctgactacggtccattcatgtgcgttggcctctgggagtctcgcctccctttctgctgctctatttctgaccctggacacacatgctcagtaaagctgtgctgagccagttaaccatgagcagggtggcggagtgcggcacctggcagccctggatctcgctttcctaacctcgtgggcctcagttttctcatctgtaaaatggcacctccatcagatgaggccatacctcatgtcagcctttgtttgggctgaacccccttgtttatattggggggatgtctttgatctgggaagtcactgggtcaggacgcaggtcagattcacctttgtccccagagcacagcatcaggatggcccagaagtgatcactgaaagttcttgcgggtggacaaatggatgggtgggaggttggatgggatggatgcatgagtgagtgtgtgggtgggggatgaacggatgtatgggagggcagacgagtgaatgggtatgtaagtggatagatgcgtgaatgaattggtcaatgagtctgagtgtagttggatgggtgactggaggaattgagtgaatggatgtatggatagatgggtacatgggtgtgtggatgggtggaagggtgagtggataggtagaacaatgaatgggtggatggcaaaataaaagataaacaatgaatgagtggatgaatagatgggtaaatggtctggtgaatggatcggtgggtggctggttggctaggtgggtgagtggatcgatatatgagtgaatatatgtgtaatgagtgggagaatagacaaatggctagatggatgggtggacggatggctagaaagacagacaaatggatgagtggatgggaggataaatgggtggatggatgggagggtggatggatgggtggatggatggataggtgggtggatggatgagaggatgggtgggtgggtggatggatgagaggatggatgggtggatggatggacagatgggtagatggatagaaggatggctgggtgcaggaggatgaatgggtggatgggaggatggatgtatgggtggatggatggataggtgggtggatggatggatgtataaatggataggatagatgaatggatagatggataagtgggtggatggatgagaggatggatgggtgtagaggatgaatgggtggatgggaggatggatggatgagaaaatcagtgggtggatagatgaatgaatggatgagaggatggaggacaaatgggtgggaggttgaatagatgaatggatgaataggtgggaggatggatggagggttgggtgagtgagtggatggatggacagaggggtgggaggatggatggatggatggatggatggatggatggatggaacatggatggatggatggatggatggatagatggaaagatggatggatgggtggatggatggatgtgtagatgggtagatggatgggagaatgaatgggtgtgagaggttggatggatggatgggagggtggatggagggatgggtggatggatggattcatgggtagatggaggacggataagtgtgggaaaatggttggatgataaatgggtgagtgtcttgatggaggggcaggtgggtgggttggtgggtggatggatgggtagatgggtagatggatgagagaatgaacgagtgtgagaggatggatggatgggagaatggatggacaggtggatggatggatggatggattcatgggtagatggaggatggatgagtgtgggagaatggatggatgataaatgggtgagtgtcttgatggaggggcaggtgggtgggttggtgggtggatggtgggtgagtgggtgggttggtgggtggatggtgggtgggtgggtggatggtgggtgagcgggtgtgtggtggatggtgggtgggtgggtggatggtgggtgggtggatggtgggtgagtgggtgggtggtgggtgggtgggtaggtataggtgggtgaacacagggcctcagcgggattattttgcgttggttcccggtgcagcacttaagctttccggagctccctttccaagtatttgttgtacctgtaggaggacacctagtccggctcagttctctgtaaaggacagtggggtgcagtggggagggggaggggaggcctataagagggtctcatcagttctccagccggggactggagctgggatcaagtggtgggcggaggaggggtgcaggggggaagagcagaattccagggccagaagggactccaggttgagtgggaagcccagccacccagcctggccccctctccacctccctgacggaccctctaacaaccgagctggccgctcccctccctgcccaccaccaccctccagggctcccgacgcccctgcccatccccccgcccctcccccactccaagcgctcccagcctccccctcccccggccgtgtctgtaccccgcccccctgctctccgcgggggcccgggaggagaggaggcggctccgtgctgcggggtgccggggcgcagagcccgcggcgggagctgtcagcgccgatcgtggggagggggctcctctgccccaggtcgatgggagcgggggcccaggctgcggtttacactgaatccacaaaaatcaccgaagcttgaaaagtgctcaataagccatcgatcgctctctgctgatcggtgccgccgccgcagcggggctggggggaaaggcggggcgagcagacccaggctccctgcctgtgccccacgcgggaccgcggccctgcatctgccccccacccacgcgaggctgcagccccagggcctgggcaagaggttcccatcccgcctgcaggcccgggctgcaggcctgaccacgctgaggggtggggagggagggggttagaaagaacgccccctcctctgtcctcccaaagctctctgtggccctgggactgcaaaattcttccccaggccgggcgcggtggctcacgcctgtcatccctgcactttgggaggccgacgagggtggatcgcctgaagtcaggagttccacaccagcctggccaacatggtgaaaccccggctctactaaaaatacaaaaattagcctggcgtggtggtgtgcacctgtaatcccaactactcgggaggcggaggcaggagaatcccttgaacctgggaggcagaggttgcagtgagccaagatggagatactgcactccagcctgggcaacagagcgaaactccgcctaaaaaaaaaaaatccttccccagatacttccagagatatggaattaagacaaatcctggctcattcactgtgactgctgtgtgaccttgagtgtgtttcttaacctctctgtgcctccattgccatatctgtaagatggatatggcagcacgcaccctgcctgcaattcatggcttccttagggtctcacttgtgaatctcctctggccttttggcaacttctttccttctcagctggggaagccgttttcctgcctgaaaaacctcttccccagtgcaaggcttggaggctggacacagttcggggcattcagggaactgccagcaccagtggccatgtattcgggaggaggtgagtgggaagaggtgaggccatggggtgggcagccacttgccaggggcagtgtttgttcttaattctggaggtagcagggagccatggaggatctagagcagaggtgtgacctgaatcaaatcgctccttccccagagctgagcctctgtcctgggttggcctctgtgctgatctcacctcctcttcctctccccccatggcccactggtcaccactcctggcccttctccctctgaagtctctcccattgaccccacactggctctctagggacctcccaaggccagatctgaactcggccctccctcactctaagccctcccaaagctccctgtggccaacccaagcccttggcccagtgctctacccccactctatgaacgagctgttccactgcaagtccagccacgcgccgcccagcccgccaggcccacctcccaccgcagcaccccctggctgttgtcacactcgcccgcatcccacccagcctttgcccagcagttcctctggactggaggtcgttccccaccctgcatgctggcgaaagcactcctcatccttcaagcctcttttccaggagccctcccaggcagcatctcccagagacagccccagcccgaggcctcctccgagccctgtctgcgtcttctcttgcagcccaggctgggggtgccttctggctgggggcaccttctgcctgttttgtagaaggcggaagaacgaggtattggtagcaggggctggggttggaggagcccaagagacacaaagccagaaccttcctccaactgcctggaaatctgaggccccactggtagatcttgcctcccacagctccctctggcctttcagcacagcccccaactgacacccagaaggacccccccacaccaggtcccaaggggagagagagaagagaaaaaaacagagagaaaaggcaagtgggatcagggcctccctccactacccgtttcacaagacccccccttctttctggaggcccccactctgagagtctcagctcccccacccgagccccccatctgatctgtgcaggctcaggggccgcccccactccctccctcaccctctccccaaaggtcagggagcaaatttcatccccacgtgtctctcacacctcgatgattaataattgaagaaaacgtatttctttgggggcccaggatacatcagaaataactacagaattcatatgctgccagaggcacgacacccatgggaagacagagccaggagaggggcacgggcttctgagggcccagaagctgacggcgctgcagaatgatttcaaaaccaccctaatagaatcacccatggaggacgttctcagcactgggaaggcaccgtgctgaggctttggaagccaatgacctcaccagctccattttacagatagggaaaccgaggcacagaccagggaagtgacttgctcgtggtcacacagtgggattcaagcaaagaccgtcccccacacccctttaacctgtcctcccgtcaccagtgccacacttcctgcacccaggatggcacaagggcatagaggccgggggcatggggaagctctcggtcctgcaccctgacagcctgtggcctgctcatcacagacgcgtcatccccactcacccagcatgtcttgaaattttttttttttgagacggagtctcgctctgttgcccaggctggagtatagtggcgcgatctcagctcactgcaacctccacctcctgggttcaagcaattctcctgcctc[135 bp omitted]ggcctccccaagtgctgggattacaggcgtgagccaccatgcccagtcatgtcctgaaaatcttgaggcatctaagttccgatgccttgcccaggctcgtttaatcctcacaaccacccctgctcacacaggagaagaccaaagctcagagaggtgaagccacctgcctggggtcccatgacacagggaggcaaattcaggtgtgtccttcttatgagtctgtcttatgagtcctggcattgcccctctcattggcatctttttttttttgagacagagtcttgctctgttgcctagtctggagagctctgcagcctctgcctctcgggttcaagtgattctcctgcctcaggctcctgagtagctgggattacaggtatccaccaccatgccgggctaattttttttttttttttgtatttttagtagagatggggttttgccatgttggccaagctggtctcgaactcctgatctcaagtgatccgcccgccttagcctcccaaagggctgggattacaggtgtgaaccaccatgcctggccccattggcatcttgaggctcagccccatgtgaggtgggacgggtgatgcttgaccccatatggggcctgccccaggatctacttgatggaaattgaagatgtcagaagacactgaggtgcatccaggttcagagatgtagctgctgcactagccaatgggtggaggtgcccaagcgtccatcaccagaaggatggatccacacaactcagccacaaaaaggaatgaggctctgacccaggccacagcatggatgaagcttgaggacatcacactcagtgagagatgccagacacagaaggacaaatcctgtgtcactccacgcatgaaagtgccctagagtcatcagatccagagatagaaagtaacatgggggctgggcatggtggctcatgtctgtaatcccagtgctttgggaggctaagttgggaggatggcttgaacccaggggtttgagatcggcctaggcaacgtggcgagagcctgtctctacggaacatacaaaaattagccgaacgtggtggcacctgtaatcctagcactttggaaggctgaggcaggagcatggcttgaacccgggaggcagaggttgcagtgagccaagatcgtgccactgcactccagcctgggcaacaaagtgagactctgtctcagaaaaaaaaaaaaaaaaaagcttgagatgggaaactttatttatatatgttttaacaccgtttaaaaaattttgggccaggcgtggtggctctcgtctgtaatccccgcactctggggggccgagatgggtggatcacctgaggtcaggagtttgagaccagcctgaccaacatggtgaaatcccatctctactaaaagtacaaaaattagcctggcgtggtggcgtgcgcctgtaatctaagctactcaggaggctgaggcaggagaattgcttgaacctgggaaacggaggttgcagtgagctgagattgtgccactgcactccagcctatgtgacacagcaagactttgtctcaagaaataaaataaaataaaataaaacaaaatttttcagaaagggatgaagttctgacccagaccacagcatagatgcaccttgaggacgtcacgctcagtgagagacgccagacacaaaaggacacacagtgtgtgatcctgtttctatgaaatgcccaggaaaggcccatccacagagacaggaggggatggaggggtcagaaattctagatgctttttcattcaggtgtacgtgctgggggggcctttattattcacgtgcccatcctccgcttatttcaatgtgttacccttgcccgatgctgctcttctgctgtgttccggaacaaaacgtactgggcatagctttgctacccaagcgaaggggactgagaaacagcggtggcctcctccttgggtggaatgctgggtggtcatcaaaggtgatgggggaggagacatttaaatgacacgggaagatgcccgtgagataacaggaaagacacagaccacatgagagtcagaggtcaggtgagcccattttggtaaaacccctgtctgttgtttttttaagagaccgggttggccgggcgcagtggcttacgcctggaatcccagcacttcgggaggccgaggcgagtggatcacctgaggccaggagttcgagaccagcctgatcaacacggtgaaaccccgtctctacaaaaaatacaaaagtagccaggcgtggtggcgcatgcctgtaatcccagctactcgggaggctgaggcaggaggattgcttgaacccaggagacggaggttgcagtgagccaagatggtgccattgtactgcagcctgggcaacaagagcaaagccctgtctcaaaaaaaaaaaaaaaaaaaaaagagagagagagagagagagggtcttgctctgtcacccaggctggagtgcagtgatgcaatcatagttcactgaagcctccaactcctgggctcaagagatcctcctgcctcagccttccaaagtaatgggaccatggccaggcaggtagctcatgcctgtaatcccaacactttgagaggccgaggtgggcggatcacctgaggtcaggagttcaagaccagcctgaccaacatggtgaaaccccatctctactaaaaatacaaaattaaccaggtgtggtggtgcatgcctacaatcccagctacttgggaggctgaggcaggagaattgcttgaatccagtaggtggaggttgcagtgagccaagatggtgccattgtactccagcctgggcaacaagagcgaaactccatctcaaaaaaaaaaaaaaaagaaaagaaagaaagaaaagaaaaagtaatgggaccacaggaactcaccactctggctatttttctaatttttatttttgtagagatgagatctcgccatgttgctcaggttggtcgcaaactcctggcctcaagtgatcctccgacctcagcctcccaaagtgctgtttttataggcaagagcgatggcgcccggcctcctagagctttaggagggagtatggccctgcccacaccttgatttcaaatttcaggcctctagactgtagaaaaatacatctgtggggttttttgttttgtttttagagacagggtctcattctgtcacccaggctggagtgcagtggtgcgatatcagctcactgcagccttgacctcctgggctcaagtgaccctcctacctcagcctcccaaataattgggacaaaaggcaccaccacacctggctaatttttgtatttttttgtagagatcggagtctcgctatgttgcccaggctggtctccaactcctggcctcaaataatcctcctgcttcagcctcccaaatcattgggaccaaaggcaccaccacgcctggcaaatttttgtagatatgggtggggtgggtctcgctatgttgtccggactggtctcttaactccaggcctcaagcgatcctcccgcctcggactcccacagcgctgggatcacagcctccccccgccccgaggtagcgggtggtgggaacgggattggaatcccgactgtggggcccctgcggccacctccaggatacagcggaccccgatgaagccctggcctgggtgctgggggaggctccgcggcgcggtcccgcaggcgggaggcgatgctgccgacgctattgctgccattactattacggagagatggggcggggcgggagcaccgggcccttcccggaagcccttcctgagcttattcagtgcctggggccgcggcgatcgatgacagctgggcgccggccgagccccctccgggccgcgcgggggcgcatgcgcggggccgcgggatcgatcggccgcgctcgggcctccccgcacccgcccgaccccgcccccccggctcgttgcccggcaacctctgcccggcgcgctcccattggctggcggcggcccgggccccggccgcgcgtggtcacttggtcagcgcgggctcggcgtggccgggggcctggctccgggcgcgggtcgatgccgcctcgcatctgacctttcccggcgcggggagggggcccgagaggatggagagagctggaccatcttggaagaaaactttattgacccgtctcttatcttggggacgcacggttccagcggcggggggcgagggtacggctgggtgggggcaggggcggccaggaccttcctcccggacatgcacggaccccctgaccgccgccccggccatctccctgggcgggctgctctccattccctagacaggaaaattgaggctcacgagggcccggggattacccaaggcgcaaagggtttatgaggtgcaaggggcctggagcccagagagtgtggctcgagggcttcagactctctctgccacgccgtgctgacatctgcaccctccaagcaaagctaaaacatcttcccgcgttgctgggtcccacaccgtcgcagcctggaacccaccaccccataaggagggaccgttccttaaattgaaatgcgatgttgaacagccacgaaaaaggacgaaatcgtgtcctttacagcaacatacgtgcagctggaggccattatcctaagcgaatgaaagcagaaacagaaaaccaagtacccatgttctcgcttatcagtggaggctaaacattgggtactcatggacacgaggatgggaataatagaccctgaggacttctaaatcggggaaggtgggggacaggggctgagaaactcctgggtaccatgcttagcacctggatgacgacgggatcggtcatatcccaaacctcagcatcacaccatatacccatggaacaaacccgcatatgtactcctgaat[138 bp omitted]cttggagaaaccccgtctctactaaaagtacaaaaattagccgggcatggtggtgaatgcctgtagtcccagctactcgggaggctgaggcaggagaatcgcttgaacccagcagacggaggttgcagtgagctgagatcgcaccactgcactcctgcctgagcgacagagcaaga[134 bp omitted]aacagagcgagaccccatctctaaaaaataatatatatatttttttgagatggagtttagctttgtcgcccaggctggagtgcagtggtgcgatcttggctcactgcaacctccacctcctgggttcaagcaattatcctgcctcagcctcccaagtagctgggactacaggcacgcaccaccatgtcccactaatttttgtatttttagtagagacggagtttggccata[136 bp omitted]tgaaattaaaaggcttaggaacagtgtgagatcttcatgtccaaacgaaactcccattacacagaggccctgtgaggggaagccccaagtcaaggtcacagacttgagaaaagcttatggttattttgaaggggatatgggtagtgccctaaacattccaatttagtaaaaaaaaaaaaaaaaaaaatcgcaaatcccccaacaaccacttgggctcattcaaatgaacacctggactttgtcaaaagaagagttattgtcagaataaagacgctgcttataaaatgctagggttccctgtgtggagccaagaagatttcttctttctttaagggtgaaaaacaagattggcttatttgacagatctgtgcatttttttttttttgagacggagtctcgttctgttgtccagactagtgtgcagtggtgtgatctctgctcactgcaacctccacctcccgtgtacaagcgattctcctgcctcaacctcctaagtagctgggattacgggcacatgccaccacacctggctaatttctgtatttttagtagagacagggttttgccatgttagtcagtatggtctcgaactcctgacctcatgatccgctcactttggcctcccaaagtgctgggattacaggcatgagccaccgcgcctggccgtaaatgttttaatatttagcacgcatgatgcttttgatatacgtgccatgccaagtccagggctcagagatttgtttaaaggtctccattaatcccacatgtaccccaaatcgctgtggttttagaaaagaaaaccttctgtgcaactccgtaaccaccttaaaggaaatacaaaaggagaaaatcgctggccgtagccttctccaccccctaaactcagccctggccactttgctcaggcctcccagcttctgtgtcctgcacgtaagcctcggtcttcacacagtccctgatatctgcatttatttcatatttttcccataacgttccacctgacatctccatctccttcctctgccgctgcgtttctaattcctaacagctgaggaaggttgcattgaccggcggattgtgtggggtgatttttgaaagcagatcctggaattcaatttttattttaacctggttattgagtggggagggagagggaggcggaggttggccgattcgtgtgcaagatgaaaaagctggattttcacaaaggttgtgctgtttggaaatggctggttaggttttcaacgtaggaatggttcaacgacagccctacgagagtgtgcgcgagcgtgcgtggctccgtgtggtttcgtgtgtgtgtgtgtgtaagtgagctgcagggtgtgtggacaagtgtgttgtgtgaatgtgcatgtgtgggttcgtgtgtgctcctgtgtgttcccgtgtgtgcatgttgtgttcctgcatgtacatgtgtggcttcgtgtgtgtgcgtgtgtggttttgtgtgtgtgcatgtgtgtgcgcctgtgcgtgttcgtgtgtgtttgtgtgtgtgcatgcgtgtgagagggtgcactcagcggctgtgcctttgtacacgtgtgaatgtgggtgtgagtgtgtaagtgctttgtgtgagcatgtggggggaaggacgcagaggcacgccagcgtctgactgtgtgtattgttaagagtgttgtggggtacacgtgtgtatgtgagctcgtgagggtgtgcaagggatacacgcgtgttgtgtgtatatgtgtatgtgcatgtgtgtgtgcaggtgtgtacatattagtatgtgcagatcagtgcatacctacgtgtgtgttcctgtgtgcagatgtgcggccatttgagggtggcagtgcgcctgtgtgagtaggtacctaggacagcgtgcctgtgcatttgtatgtgagtgtgtgtgctgtttttgcacgcatgcaccggtgtgagggtgtgtgtgtatcggtgcacatctatgagcatgtcagtgtgtgtgagtggcagaaggtacacgggtgtgtacgtgcgtgtgtatacctgttcgtgtacctggcagtgtgtgggcatgtgcgggtgtgagggtgtgtgtgccggtgcacaccagtgtctgcacctgcgaccaccccgaccccgtgcccagccccctgaccctctcctgctgttctcactgcggggaaacgggtccaaccccaccactgaccccagctcatctcaggcctcccgtccacagccacttcctcaggagccctcctggacccgccagcccgggtctgaccccggtatcagcccgaggggcctcgtcttgaacggaggagccgctggttccactcatgcatttatttcataaatgttggcctcccgggagctccataatggcagaggcctgtccgccttgagcaggggtccctccccagagcctgggattaaagaagagaacccagtggtcctaggtgcgccgtgagaacatcaaacatcggccagggctgcacacgggaggccctcgggggtgcagcgtggaagccccctggacagatggagaagctgaggccctgtcaacaggtcccccgcgtcctccccggccctgtgttgatgggcggcagctgtgtccaggcacgctgtccccgttggacatggccggacgcatggatttccgaagccatctctccatctggcagctttattaacccaattccagggatcgagtgattgacgtgtttgcttatcggctcctcctgtctctccagggacgggtgcccaggtgcccccaccccacctccatcggcccagggggagaggggacaccagatcccccccacagccccgagaccaacgcgcgcacgcacacacacacacacactcacagtgactcccgctcaggggctcttggtggctggatcaattcaagtggatctttggagaacatgatgggccaatgtctaacaaaatttaaaatgtgaactcaggccaggagtggtggctcacgcctgtaatcccagcattttgggaggccg[134 bp omitted]gaggcaggaggatcccttgaaactgggaggcagaggttgcagtgagctgagatctcgccacttcactccagcctgggcaacaagagaaaaactccatctcaaaagaaagaaaaaaagaaaaaaaaattagccaggtgtggtggtgagcacctgtggtcccagctatggaggaggctgaggtgggaggattgcttgactctgggaggttgaggctgcagtgtgctgacactgcgtcactgcactccagcctgggagacagagcaagaccctgtctcaaaaaaaaaaaaaaaaaaaaagccagacacggtggctcacacctgtaaatcccagcagtgtgggaggctgaggcaggtggttcacctgaggtcaggagtttgatactagcctggccaacatggtgaaaccccatgtctactaaaaatattttaaaaattagctgggtgtggtggcaggcacctgtaatcccagctactcaggaggctcagacaggagaatcgcttgaacccaggagacgggggttgcagtgagccgacatcacaccattgcactccagcctgggcaacaaacgtgaaactctgtctaaaaaaaaaaaaagctgggtgcaattgctcatgcctgtaatcccagcactttgggaggctgaggtaggcagatcacaaggtcaggagtttgagaccagcctggccaacatagtgaaaccccatttctactaaaaatacaaaaattagccgggtgtggtggcgagcgcctgtaatcccagctacgtgggaggctgaggcaggagaattgcttgaacccgggaggcagaggttgcagtgagccgagattgtgccattacactccagctctgggtgacagagcaagactccgtctgaggaaaaacaaaaacaaaaacaaaaacaaaaacctttctagatatattcattgaaaaggctaggtgcccccaaatgagttggcaacttgtgtccacacaaaaccctgcacacgaaagcttatggcagctttattcatagctggccaaatcaggaagcaaccaagcttcccttgagcaggtgaacgtatcagtgggctgtggtgtattcagacagaggaggatcattcagtgctggaggaatggcatgtccagccttggaaaatatggaaaggagggtaggagtggggagggatgaaaaactacccaccgaagctgggcgcggtggctcacacctgtgatcccagcactttcggtggccaaggtgggaggatcacctgaggccaggagctccagaccagcctggccaacaaggtgaaagcccgtctctactaaaaatataaaaattagccgggcgtggtggcgggcgcctgtaatcccagctactcgggagtctgaggcaggagaatcgcttgaaccccagaggcggaggttgcagtgagccgagattgcaccactgcactccagcctgggtgacagagggacatttgtctttaaaaaaaaacaaaaaaaaaagctacatgctgaacagtgagtagagactggtcacattaagtcagagtatgtctctaagtatatacagatacttttttttttttttccccttgagacagagtcttgctctgtcacccaggctggagtgcagtggcgcgatctcggctcactgtaacctccgccttctgggttcaagcgattctcctgtctcagcctcccgagtagctgggattacaggtgtccaccaccacgcccggctaatttttgtatttttagtagagatggggtttcaccgtgttggcgaggctggtcttgaactcctgacctcagatgatccacctgccaggccctcccaaagtgcaaggattacaggcgtgagccaccgtgcccggccacggatactcttcatggtgtgtatcatgaggccctaggacagataatgaaggcttccacgtccaagggcacagggtggcacgggaagggttgaggtgggcatttatttttttgctgtttccatgtaagttttgtttctcccacgtatatatgtatattacttgctcaaaaacagattgcaaatgtgacaaaaattacagatacctattttgtagttcagcttttctgaggttcgcaggacaggggacgcccctcccacagcccagctcctctgcagatggctctgatctgacttccccagggacccagggcttttctcccgtgatccctgctcctggcctccagttcccgaaactcaccagctctgagcaggtaggaaaaagtggcttgtgtctacagagcccagt[143 bp omitted]agaaaccccgtctctactaaaaatacaaaattagccaggcatgctggctcatgcctgtaatctcagctactcaggaggctgaggcaggagaatcgcttgaacctgggaggcggaggttgctgtgagctgagatcgtgtcatttgcactccagcctgggtaacaacagtgaaactccgtctcaaaaaaaaaaaaaaatccactccaggctggacatggtggagggcacctgtagtcccagctactcgggaggccgaggcaggaggatctcttgaacccaggaggtcgaggctgcagtgagccaattctcctgtctcagcctccctagtagctgggattacaggtgccctccaccactacactccaccctggacaacagagtgagaccctgcctcaaaaaacaaaaaaaacaaaacaaataaaaaaacaatgcagtcctaccccttgcctggctgcccctgactcttaagggaatgatgacacctccccgccaggcccacagacgctgccgacccagcccctcctcacctcaatgctctcctaacccccaagcctttgcctgcttttcctacttctcttcactgaatgaactcctgcacctcctacgcctttcggggcaacggtgcccttctcaactcaggctcccagacccgctgtcagccatggtttaaagtctgccactggccgggcacagtggctcatgcctgtaatcccagcactttgggaggtcaaggtggaggaccacttgaggccaggagttcaagaccagcccgggcaatataaaattcgctgagcatggcggtgcaagcctgtagtcccagctactcaggagctgagtggggaggatggcttgagcccaggagttcgaggctgcagtaagctatgattgcaccactgcactccagcctgggtaacagagcaagaccctgtctctaaaaaaataaagtcagccaccaccctcacactgtgagcctctcccatcaccacagggccttccatggccagctccaggcctggcatcagcgggtgcaggaaaagctcagtggagcgattccacatctagggctcggcttgtaaaattaaaataagtggagacccccccacaacccccagccacacgcaggcagtaggaacccgggagatgggacgagcgccgaagggttattagcagatgcctcgagccccctcgagccccgcagagtgggggaggatggcggaggcccttttaaggacccagtatcaccgtcctttctcggccagccgggcacccacccacctgagtgagcctggagcagcccattaagcgatttttttcctccacttacggttggcagcatcgacaagcatgctcgatatctgacgaggtgctggccttggaagagagcgagccgcctcgataaactattccctcttgtcagcgcctcctcccgcacccagcccggagcttcgcgtttgatcccctcccctaatgagctcggttttctcccctccaggcggatgagacgctccccccaccctcgcccgctcagcctttcaagttcagctgggctgagattcaaggtgggggcggcggtggtggaaggaaaaccatttccaggttccgatggggtcacctcccccaggaagtcctcccagaatttctgcagctcagatggtctcgtgcatttgtggggagggtctggggtacagaaagagactgggacctagatatggggggtcgtacagcagtgtccaggtgccacgattgtcatctgtccattcattcaacaaagggtttgggggtgcagagctgggcacaggtgctcccagctgaggactgtgccaacgtgaggggctgggcaggatggggcaggggcccaggaggcggcagagcagcagagaccctcaagaggggacgatgacagcctgatgaacggacacagagttggccaaaccgggcttggtcagcctgcctggaggtgggggagagagtctgaaccccacccggggaggggcaggcaggtggcagggttgggagaagcccccttcccagaccagagaccctccagtctggcttcagcaccaagaacagctccctgcctcttcctctctggagctccagagggacccccatttgtcagatgtcccccagtcgtcgcccagatggaccagcttcttcctgccgaggccttcagggcctcccaggacctccctgggctctagtattttcaataaaataggaatcgtgccgcaacctcagggggtgggcacgcacagacatcaatgttgtttgcagacaatgagtcactggacactggccgatttttctcagcatctccaatatt[134 bp omitted]accctgtctctgcaaaaatttaaaaattagctgggtgtggtggtgaatgcctgtagttccagctactcaggaggctgagg[131 bp omitted]caataaatcatttcaaaatttaaaatcagatccaaccccctagttttattaaaatggaacctgaggcctgagaagaattatgcccctcccaccagccagattccagaatcttctctccaggatgaagggcctcatgggcaagaggaggccaggagggaagggggcttccaaggaagacttccacccaccaaaaggagccccagtcaggcgcggcagctcacgcctgtaattccagcactttgggagtccaaggcaggcggatcacctgaggtcaggagttcgaaactagcctggcaagcatggacaaaccccgtctctactaaaaatacaaaaaattagctgggcgtggtcgcaggcgcttgtaatcccagctactctggaggctgaggcaggagaatcgcttgaacccgggaggcagaggttgtggtgagctgagatcgtgccattgcactccagcctgggcaacaagagtgaaacttcgtctcaaaaaaataaaaaaaaggagccccatccattctccaaattataatggtgcactgtgcagggtgttgctgaggtcctggaagagagccagagcccccaggaagcccccccagggtcagggaagacaagggacccagaactgggccagagggagagacctgagtctaggggaagaggaagtaaaggccctgcggtagagtgggcattgaagctgggttctgcaggtagagtaggagtttcttagcaagagctaggagaacatggcccatgtggacagagtcgagaggggctgacacctgggctcaggttgggggatgccacctcctcagaggggactgtaatggtggatctggaagacccaggcttggagccaggctggtgagcccggctcacagcccaaggtttgctggggcctcagccaggactaggagcaggtggtggcagttggaggtgggctggaggagccgggcctgcccagagggacccaggcacccacggggcgagcggcgagggaggcagaaagcaaagcctcaccaacccccccctccactcaccagacatcaaacccagcctccccacctttcgaggttattaatttttcagagaagaaaatgctttttgtattttttccaggcaaaatattgataatgggcttaatgtggccttcctgcttttgtgtgtcgggagagagagcttttctgtcctggccgctgcagaagctgttcgcccccctccagcccccgcagcctccatcggcagaccccatgcacttggccgctgaagcccaggcagggagtgggggcgcgttttgatcgccaccgagcgggttggtgcagcccccctccccatctcgagccctcctacctccgcctgcacaaagccggacgcctgcccgccccaccgtgggtcgatgcaccctgccaggggagctggtgtttcccgcggctccaggctgatacatctttgagttgtttgaaattttgcttcctttctctcatggcgacggggaggcaggaaggcaggggcctctgtgcattcactccttcattcatgcattcattcattcactcactcactcacccagcccccagtcaccatgcacctgctgtgccccaggctctgtgctggatgctggggccaccggccgggacagatcgggcccctgcctcctcaaagttcatagtccaggagagagaagaataggtacaaagccaaaaacttccaggagaaaatatggcattacggacggtgatgagaaccctgtaagacagacacaggaggcctggtgcagtggctcacacctgtaatcccagcactttgggaggccaaagcgggcagatcatgaggtcaggagtttgagaccagcctaaccaacatggcaaaacccagtctctactaaaaatacaaaaattagctgggcatggtggcaggcatctgtaatcccagctactcaggaggctgaggcaggagaatcgcttgaacccaggaggcggaggtggcagtgagccaagatcgtgccactgcactctagcctgggcgacagagtgagactcggtcaaaaaaaaaaaacagacacaggagagagaaactgtgacacaggggagagccaatggaggctggggtctcagggagggcttccctgaggcagtgacctcagctgagacctacagaatgaggatgaggccgggtgcggtggctcatgcctgtgagcctggcactttgggaggccgaggtgggaggatcatttgaggccgggagtttgagaccaacctgcacaacattgtgaaaccctttccgtataaaaaatagaaaaaaaatagccaggcatggtggtgtgtgcctgtggtcccagccacgcaggaggctgaagtgggaggatcgcctgagcccagaaggtcaaggctgcagtaagctgtgatggcaccactgcactccagcctgggcaacatagcgagatggtgtctctacaaaaatttttaaaattaggccgggcgcggtg[168 bp omitted]gaggcaggagaatggcgtgaacccgggggggtggagcttacagtgagccgagattgccccactgcactgcagcctgggggacagagtgagactctgtctcagaaaaaaaaaaaaaaaaagaaggataagaggcctcagtgagatggggcagcgaggacctgcccttcctgggggggaacagcctgtgtgaaggcccagaggcgtgaggtagcagaacctgcccattcagtggttttcagacctgaacgtgcagcaggacccccgggggcctcattgaagcccagattcccgctccctcccatatccagaagccccccacattggcaggccctcattcagagaagctggggttgcagaatttgcacttctcacaagttctcgggtcacactgatgctcttggcccggggccctcactccgagaaccacagactcaggggctttgtgagatgaagacaccggccaaccctcgaccccaaggagcaggcaaggggtgggggccagagccggacaaccccagagccctcacttaccctctgggttctctaggagaattcccttgaaactccggtccttgatttccccatctggaaagcgggtgcttgataagtttcctggtttcctgtggctggtgaaggcacgaaccaagacgacacaggtagggtggttaatgcagagcctggcccacagcaagtgtttaataaatgtaagcagtgactgtgagcgctgatgaaggctgtgtatgggattgatgaaggggcaagaggccttcaccaggctggtggccggtgaaaatgcagaaactggatgggcgtggtggctcacacctgctacatgagcactttgggaggccatggcaggagaatcacttgagcccaggagtttgagaccagcctgggtaacatacccagatcccccatctctacaaaaaataaaaacttgccggctgcagtggctcacgcttgtaatcccagcactttggtaggatgaggcgggcggattacttgatgccaggagttcgagaccagcctggccaacgtggtgaaatcctgtctctactaaaaatacaaaagctagttgggcatggtggcacgcacctgtaatcccagctactctggaggctgaggcatgaaaattgctggaacccaggaggtggaagttgcagtgagccgagatcgtgccactgcactccagactgggtgtcagagcaagactgtgtctcagaaacaaaaacaaaaacaaaggcgggcgcggtggctcacacctgtaatcccagaactttgggaggcagaggcgggcagatcacaaggtcaggagattgagaccatcctggctaacacggtgaaaccccgtctctactaaaaatataaaaacttagccaggcagggtggtgggtgcctgtagtcccagctacttgggaggctgaggcag[137 bp omitted]tggtatatgcctgggaagtttgcttgagcccaggatgtcaagtccgcagtgagctatgatggcattgttgcactccaggctgggtgacagagcaagatcctgtctctaaataaataatgcagaaaccaagggcatggcacccatgaatgtgctagctgcagctgcgtaacaaatcactccaagtttaccagcttacagcaacacgcaggcactgtctcccggcttccgtggctcaggagtggcttgactgggtcctctttccaccttctcccacggtgccgatcaaggtgctggctgcgttgagctccttcctgaagttgaaagtccttgaccaaactcctgtggttgtcagaggaatgcgagtccttgaggttgtgggactgaagtccctgatttgttttattttggtagagaaggggtctcactatgttgcccaggctggtgtcaaactcctgggctcaagtgatcctcccacctcaaccttgttttcttcctgactgtcagagttcacccacccaccgttccctgcctggcctcttccagggaccaggagagaaggttctcagtttgctaaatggaggctttttttattttgagacagagtctcactctgttgccctggctggagtgcaatggtgcgatcatagctcacgacagcgattctcctgcctcagcttcttgaatcactgggatgacaggtgtgtgagccactgtgcccaactccagagtggagtcttatacaacacaagttatcgtggtggtgacacctaacacctttgccctattctgttggctacacggaagtcacaagcccaggcctcacttaaggggaagggatttgcaggatgaaaca[180 bp omitted]catg[137 bp omitted]gcccggccactggggccactttctatcaaccacacctggctcgggcatgcacctgccctcccccatgcatacaggcccacatccatgccttcaaatggccacaaaagtgtgcgtggccatagacatacatacttgcaagtgtttctctttttgtgttttgttttttgttttttttgagacggagtcttgctctgtcacccaggctggagtgcaatggcacaatcgcagctcactgcaacctccgcctcctgggttcaactgattctcctgcctcagcctcctgagtagctgggattacaggtgcgtgccaccacacctggctaatttttgtatttttagtagagacagggtttcaccatgttggtcaggctggtctcaaacccctgacctcgtgatcctcccgcctcagcctcccaaagtgctgggatgacaggcatgagccaccatacccggccagtgtttctctttttgcattgcccactgggaagctcagagacaaaattatggcctgtgtgtagcaaaggttcagaaccacctattgtgacttctcttccagcgacatctctcgaccttggttgtaattcattttctctggctgccttgtctgtttgcaattctttcctccccagtctttctgggcccatagaggctgacaatggcagcggcttctgtctgctcagcatctgagtgcagttctaaggaccttataagaattttctcattttatgctttcaagaaatctcctcctacagaggagggatctgccacacagagaggtcgtgagagccaccccaaggacaccagctgggagatgggagagctgggatgagaacctggactcaatccccagcgggcagatttttttttctttttagacggagtctcgctctgtcgccaggctggagtgcagtggtgcaatctcggctgactgcaacctccaactccctgcttcaagtgattctcctgcctcagcctcatgagtagctgggattacaggcatgtgccaccacacccagctaatttttgtatttttagtagagatggggtttcaccacgttggccaggatggtctcaaactcctgaccttgtgatccaccagcgggcagatttgagagctgggctacacactgacatgctttacatgcagagtgaccaagccaggagaatccaccagcaggggactgtggcgtcgcaaccccctccctggggtcgcaacctcctccccggggtctcagcccaagctttgaatgtgggctgccactggcataaataatcgtttataggccgggcacggtggctcacgcctgtcatcccaacactttgggaggccgaggcgggtgcatcacgaggtcaggagttcaagaccagcctggccaagatggtgaaaccccatctctactaaaaatacaacaattagccgggtgtggtggcggacgcctgtaatcccagctactcgggaggctgaggcaggagaatcacttgaacccaggaagtggaggtttcagtgagccaagattgcatcactgcactccagcctgggcaacggagcaagactccgtctcaaaaaaaaaaaaaaaatcgtttacaaatgtgttccaccacacattgatcccccacgagagaaagtgctgcttcagggaattctccctcgagtggcgtccccaggccggcccagctgcacccaacgaagtccacacgccaggcctgtccaggagccccttttggccactggacaagggtctggctgggccctacagccctcccagatctgatcccccaacaaagggaagaccaggatccagcgccacggtgccttcatgagctagacaggccctgagtcccgtgctccggattccactgaacagaactctcgtgcacgtttccccacggcgtgccccccagccggagccgggtgatggggacatcatcacaaactctgtgccctccaagggctcccaggcttggagagggagacaacagaaaaaggagcccgccatgctggcagcagggggcacacagtaggtccgcagcaggggaacaggaggacggattttacaggaccgggcaggggcacagtagggccctgttggccataccgacctctgactcctagttccccgccgaagccacctctttgcagctttgtgcccggggtcctccttgcacacctgggttttcctcgggccgccctccgggtagaacagctgacgtggatgagcgctgaccacgtaccagggcccgggccaagcatgcgacttacatctattcaataagtcaacgtggtccccattttacagatggagaaactgaggcacggcgagtgacttgagctgcccagggcccgtcagcaggggaaggggtgccagctgaactcgggagctctggcctgtcccgtggtgagccccacggcctgagtccacatcccagttctgccctttttaaggttcagggagctgcggcctcagtttgctcactcacaaaatgggaacgagtgtccggaagggatggaagggcacatgaacagaggcccccattctgaccattcttttttttttttttttttgagacggagtcttgctctgtcacccaggctggagggcagtggcgcgatctcggctcactgcaagctccgcctctcgggttcacgccattctcctgcctcagc[131 bp omitted]cagcctcccaaagtgctgggattacaggtgtcagccactgcaccccgcctgacgattcttaaagaagcaaaatccaggcccccaccccagcccggccccacaccagctggctcccaggaggcctgggctctgcctcgagcaccccattcactcctctcctgcagccccagcatttctacccattgagaggaatcaaaaaacagccccagccccaggaaggtggaaggaacagaaaaccagggctggtgcccacagggaaactggaacaaacccataaaactgaggctggtgaaccccaggccacctaactccaactgcacgggagccccggtaccatctccccagaatccgcccctcaggcctcagtttgctcacctgtgaagtggggcctgcaccgcccagctcaagggactatgagggaatctgcgcagatggggacaaagcagcctcccttcgctttgtgcaaacctctcctccttgccccggcctcctcctggcctccagagcagagctggcccccgactccagctcccccaggatcgatgggaggatcaattccagcagcagcaccgggctgtggggggaggggggctcctctgggaagcctccagttcccctcctccctccccctcctttcctcccccctccccttcctcccctttctcaccctcctcccatctcccctctgcttcctccccctcctcctcttcctccccctcctccccatcccttcttcctcatccttttccctcacctccccctccctcctcctcttcccccctccagcttctgtcctctgagcctggcccaggattccttgcccctcccccaccggtccaccctggctgtttatggggtgggcagaggctggtggccgcccttgtcacagcctttcctgagcactgtcagatgtcctcaagggtgcactgtgtgtgttttatccccattccacagatggggaaactgaggctccagaagggtccctgatgtgggaaatgaaggcggggctgggatttgagtctggaacccaccctcaaccccaaaggggagaagccccggacaccacgcaggcgctttgggaatgaggcacccttggcggatggactgggcgggctggggtcagaggtcacctgccctgcccagcagccgcatggagatcacccagtagccctcaggagtcggggctcccacttgtgaaccgggtacgccacccctggagatgcagagctggctggacacgcacctacctccatcttctattcccctctgagagctgggggcgggtggttctttggtttttctccagggaatgagaggcgccctctctggggggtaagagccttggatctgcctgtttcctcatcggtaaaagcaaggggtcaacaggatgaccccatccctccccaatccccttctcttcttgccggcgctatgacccctggggagcccctgcccccaggcctggcagcccccagggaccctcctactggggcctgccacggtggggggacaatgtttcccattttctgcggagccccccaactctcacctccaggcagaggtgaggtgatgaggggctggaggaggctccccctccaattccatccttgggaaatgccaccctctcacctcctggcgcccagggagttcagtaataacagaaacgttttgtttggttttgcttaaagcgagcaggagggagagcgcgaagccaacggctcctgcccagcccaattgtggggatttaccatggaggcgattactgagcggaactgcgggcggctctgctcggagggtcccgtgcttgttagggaggtgggagaaacagcaattacagctgttagcaccgaggggaggggaggagggggaaggagaaacggaggaagcagaggagaggggagcagggagaaggaagaaggaagagtggatgggggagggagaggaggctggaagggaggaggggagggctggaaggagaagggggagtagaaggaaggaaagggaggagccaggagggagactaggaatgggaggaggggggaagagggagaggaggagggggaaggaggggggaagggggaaggaaagtagaggagggggtaggaggagtgggaagaatggggaaggatggggaggagggagaagggggagtagaagggggaaggatggggagggaggggagaggaggagtgggaagaatggggaaggatggggaggaggggcaggaagggggaggagggagaggaggaggaggatggaggaggagtggggaggaagagggagggtgaggaggagggagaggaggaaggaaatggaggaggagtggggaggaagggggaggatgggggaggagggagaggaggagggagatggaggaggagggggaggaagggggaggatggggaggagggagaggaggaggaggatggaggaggagggggaggacgaggtaggaggatcctcacccttcaagagcatcaagttttcctccccagtgggagaagctgaggcccagagagaagtctctgctctgacaccccacaagagctttcccaaccaacaggcccctctgggactccctctatgccctgcccagggccccacagggctcgctctgcttcctgctctcttgctgcaggcctggagctgggaggtgggcaggtgatggccagagcaggaggcggctggccccttcccctgtccgctgcctcaaatgattaaccagtgcggctggagtgaggagtggacactgggagccggttcctcaaataccctccacacctttgaccggcgcatgggccagaacgggggacccctccagctcaggctgaagagctcccccaactgccgggtccagagggtcctgcgctccctgggatcgcccgaagggctgggtcggagggggaccctggcgcagggaacgttctctgtaactgagatccgcgtttctactcaggagctcagctgagactctctgcgtggccaaccctctccagagaccggctccaccgccagccagattggatgctgagcgtgtccacacagcacgcactcactgggactcagcgtgctgggactcagctccccgccgcccagtccctcgggcctaggtcagctcgccagctggtggcctgaggcagatctcaggacctccctgtgcctcagtttcctcacctgaaaaatgggaataattggagttgcttcctcagagtacccctgcccctagctccctgcaggtacagtggggatggggcaggagatagagcggggacctgcaggacgtacccctcccccagggaatgggggacgccaccccacccctggcgagcccggaaggtggctgctgattgaacaatgggagaaacaagctttcttctagcgcaaggtgactcacctgctggcccagggacaaagctcccccagccactccccaccgcccgccaccccccaccgcccgccacacacacacacacacacacatacacacacacacaccgcacagcacggagagggggtgagtcattccaccccaccacatctgtgatggcctccctgggtgcgtactaacctgtggggtggggggattatactaagggccgcccgggaccctccctgcttggcctcacagccagggagagaaggcccaaccacccccagcctggcattcaaggcctggctttgaacacatgccccccccccacacaccccagcttcattcagttttatctcattgactcattcaacaaacattccctaatgaagtcctgtgagggccccgaaactgggctaacgccagacgcctccccagccccaccgcctcttcctcagatgacaaggagtcttttcgtccttccattggcctacctgacttggactcctacacatcctacaaaacccaacctcagggctcctcctccaggaagggaggactgccgcctccccagttctgatctcagggggatggggatgacttttcccctccctaagtatgggagccccagcgggagggacagaggctgtggccgcagctctagggtggtgggggcaggggagcaggagtgatctgagaagtttgctaaatccagcgaatggcctggttcccctcccccatccccggtctgcagattctgcctaaggaggtgcgaatcccttcccctttccccattccccattccccagtccaacaccccctccccacccagaggtccacgaggcgagacagacccaaagagagaggcaaggacgtgggcgttggtcggtcttgcggggaggaggtgccgtgctctccccacttcctgacccagcagaaagcgcccgggcgtgtccagataaaccgcgccttaatcgaggcgccattccggcccggaacaggccaggcccaggtgaggctcagagccagatgcgcccagcctaacccacctggggacgcccctcggaccctcccggggcggggtcctcactcccgaccaggacctctgtctctgcatctgcgaagtgggcgcccccaggcctgtgctccccccacccacctgtcgtctcgtctcggctttcagggtgcagagtggacactcccaggtgtccaagccggcgagctcgggtcccgcagaaccggcggccctggagacgccccgagggcagccccgctgcagccttgctcgggtcccctagcccggcgcctccgcaaaccaacccaccgcgggccgccgagccccgctccgggatccgccggctgcctccatcccagaagagtgcgcagagaattaaatctagatatttacatgtttaatggctaaaggagcctgtcttctggcagggcagggagggcgctcaggtggtttaactcagcgccgggatcccgctcagctgcgggggccgcgaaccccgccgctgggccgacgattgggcccctccggagcgcggcgcccaacgcgggtttcgttgcgtcggggaagtccgtggcctgcagcgtccagtccccaggctgtcagccgagccctggagtggggcgttctccaggcccccaacccctgatccaggccgttcccctcccgcgcaccctccggcgggggctgcagcccgcgcccctcgccgccaagccccattttcccacagtgcaaactgcagcaaacgaactggttttctcctgagcgcacgctgcggggagacgattccaacggcgtccagtgaggaggggcccaggcctgcgagacggggcgcgttcctgtccccagacccctccggctgcgcctcaacccccagcccggctctctgacctgcatcggtcgggccgggcacagaggaggcaaagcaggcggaggccgcgagaggagagcagcctgacctcccgcctgagcccggacccttcccctcgggcaccctcggacgcccccgccccagcgtgttactttctagatggggaaactgaggcgcggccagggcgatgcggcggaagtcccgcgcccggccgtctcccgcgcctgccagacagagccccgagaagagggcatagaattccctcctctaattgtgtcccagaactctgggacgacggaggccaagctgctgagggaggggacgaggacgcggggccccagggaccaacccctccgctccccggccagccgcggccgcccagcctcggtgccccggcgcaaacaagcgcggtgtttgccgagcgcgaggcgggcggcgcggcccgagagcgatgaggattcgatggagccgctcgccgcggcgggggcaacggagcccgggcgggcgcggggatcgatcgggcacagctgtcgcctaagagcccgcgggagcatccacccgcgggccagagctgcccgggcgccccgcaactgcgggcaggaaatccgggacgtcgggcccgccaggggcgaaaccccaaagtcgcgacacccggggtggggaggtcaggacgtccccacggccaacgtggaaccttcgggagccgcgcgctcagcctcgccgggacccccgccaggccgtaaaagcccagagtctccccccaaatctaaataaaatccccagaccccgcccgaacgaaggcggctggagtccagagggagaactcctgccacacactaggcaccggcggccgggatttggggcgcccgcaggtttcgggggccgggagtgggagcagagcggatctagggctgcggctgggcttgggtggggcgcgcattcattgccatcgtttagtaaaacctcgctttaataaaagcagggaggggtgcgcagagcccggacactttcatttcggtgggagacaaatcgaatcagaaagtcagttgggggcgcactgtgcagggttctgggggagccccaggaaaggaaaacttgaggtatctgactctgcctttgatatttttagctgcaatgggagagtcaataacaacagggaaggtggtgtgtccaaaaatgggggaggtgtggaggattaaagagggggttcaagcttagggggtccgtttagggagtttgaagccgtggagagtgcgcacccctggggcatgggtggaggcccccagtcctcccctccacccgcgggactctccaagccctgaggttggcaggaccagaggctgccctttttgactcctcccagacgcaggccaggcacagagagggtgagcgttggtctggggcagcccagcacctgctgaggtccccctccccaactcccagacacagactcgggctctgggagtcaaactttcatcttcctggaggggatactgaggccagagagcttcctcgaggtggctgaggtccctgtggggtggggaagggggacttcttgtcccgatccagcccacccctccccctgcccacaatttgcctaatgacccaggatcgatctgggcctgggcagccagcctacccggtggccggctcaattctattttactaattactaaaaggctgctgctggtggggagaagcaagctgggggctccagggggccacagtccctctcttggggccagcaaaattctgttcaatctctcaacgggaccacagcctctacaaggagtgagatccccatccctgggggagtccaagtgtccatcagccgaagggaggggtgaggggcttcgcagacctggatagggttaggtccaccaggctgggctgccccttccaagtctagggagctttggaaggggtctgtggccaccttagcgtgtcctgaggcagcagaggggagaggccctcttcctctcggagtccctgaccctcgtcttctctttcaaaatggatgctttccctgctagaaaagccacacacgcttgctattaaaatgaacacgatcatcaagctgtaaaaaatatatttaaaaggaagcctgcaaaatcccagctccctaggagctcccccacattggcatttgggggaacttccttccaccttgttatcctcccacccgtagagacccccagcccccacctggtctgcgcttcttgagcctgggatgctagcgttttatggcggctgattgatttttagatctcacgattatttttaattatctgtgattgttggagggtgagaatgaggagcgcaggctggggctctgtgcagccacatcccccccgccgagattcagcatctgcacggggagtggggtacgcgactgttcggacctgcccctctcttcccacctggaagatgggtgtaattatgtaaactccagaaattatacctgaaccctggaactggaaagtttagggaccgacacttcagggggcaggagttagcacttgggcagatgtaggaatgaaggggggaactctagggccaccacccccccaccttgggccagagacacccggaaaaattgtgatttgacttccccctctctggggctgagagaggagagtatgcctggtaaataacaggcacttactaaatgccgagccctaagcagcgagtactaacaggggtccccttcagccctatccctccccaggacttggatcaggccacctcaggctgggggcccagatcattcaggccccctctctctctggctgttgtggtcagcatagactcacctccggctcccagctgggcaggctggagggcaccccctcccacaccagagaaggggaaactgaggcacagaaagggccctattccagagccaacctagtcttggttcagaaaatcgcatctccaatgtgtagccacgtctacaggggccaggaaatctggatgcaggtgcaaagctggggccggggtttgcccagaaggtttgcaccaaaggggaagtgacagcctgactgtgtcctcccctcttccttcagctttgagccctgatgcaaccctctgagatgggggtaactgggggctcccgcgaaccgactgcctgacccatccccttcctcttctagaaagtgcacaagcgttaccccgggggtggggggggcagaggcaacggggaagcaggaaggggctgaggctggttttggactctgcaccgtagcctctggcctacaagacagagcatcctctagattctggtctggcccctccagatccgcagccctgaccttaccccactggcgggatctagtcccctgggggtctctctgattataggagcccttcccccatctatcccagttcccaggggcccctggggctcacctgtctccaggtgctgagaaaaaggagacccctgcctccccccacattgaagagaagccccagggacaaagaggagtttgcaccagcgacgtctcagaagacaggggatccagcctcagcctccgtgggctggagggtgacaggggctcttagtggtcacccccaggctccagtgcctccagcggccgcactgtaaaaaggccctgcaattagaaggggcctttggcaaccccgaggccgggcagcccattgtacagttggggaaacggaggcccaggtgcccacacatgggcagaggctgacccctggggcgcacggaggccctgacctagccttaggacctcccttttcccccacttcctccacaaagaggttgtgggaagggggctgtgactccgtaggtgtgagtgggagtcgggggaagctgagcttgcagtggggatctagctcctgggggtctgtagggaacggggggggggggggacacgtacattacaggcgaccgtccagccacactcccagaaactccctggagatggacttgggggtgccaggcagaaagccacatctgggactctggagagaatcacacagagacgcgaaatcggagactctgggtcgaggcccccagccccacctgggcagagtctgtcctcggacccccgcccgctgtcccccgggtacggcctgccccagcgggcgcgggcgggcgcagtggccagggacgccgaagccccaagtctggccgacttcggcctgcttggtgctcgagtggggccggggcgggcggagagcgaggctgcgggaggcagcggtggcaggagcgggtgggcgggggcgctgacgtcagacccgggcccgggcgccggcggccgctcccctgccacatcctggtggccgcgctcgcagccgggccgggccgtgcgccgcgcagcctggcagcctcgcgcgcagccaccggggagcgggcgggagtcatgcagcggccttgagcactaggggccggcgctgaggagcgcgcgcggcgggagggcagccgagcatggagctgagcctggagagcctggggggcctgcacagcgtggcccacgcgcaggcgggcgagctgctgagcccgggccacgcgcgctcggcggcggcgcagcaccgcggcctggtggcgcccgggcgcccgggcctggtggccggcatggcgagcctgctggacggcggcggcggcggcggcggtgggggcgccgggggcgcgggcggcgcgggcagcgcgggcggcggcgcggacttccgcggggaactggcgggcccgctgcacccggcaatgggcatggcctgcgaggcgccgggcctgggcggcacctacacgacgctcacgcccctgcagcacctgccgccgctcgcggccgtggccgacaagttccaccagcacgcggcggccgcggccgtggccggggcgcacggcggccatccccacgcgcacccgcacccggcggccgcgccgcccccgccacccccgccgcagcgtctggcggccagcgtgagcggcagcttcaccctcatgcgcgacgagcgggcggcgctcgcctccgtgggccacctctacggaccctacggcaaggagctgcccgccatggggtcgccgctgtcgccgctgcccaacgcgctgccgcccgcgctgcacggcgccccgcagcccccgccgccgccaccacccccgccgctggccgcctacggcccgccaggccacctggctggggacaagctgctgccgcccgccgccttcgagccgcacgccgcgctgctgggacgcgcggaggacgcactggcccgcgggctgcccggaggcggcggcggcacaggcagcggcggagcgggcagcgggagcgccgcggggctgctggcgccgctgggcgggctggcggcggccggggcgcacgggccgcacgggggaggcggcggccccggcgggagcggcggcggccccagcgcgggcgcagcggccgaggagatcaacaccaaggaggtggcgcagcgcatcacggcggagctgaagcgctacagcatcccgcaggcaatcttcgcgcagcggatcctgtgtcgctctcagggcacgctctccgacctgctgcgcaaccccaagccgtggagcaagctcaaatccggccgcgagaccttccgcaggatgtggaagtggctgcaggagccagagttccagcgcatgtcggcgctgcgcttggcaggtaggagcgtggcgcgcagggccagaccctgggggcgccggctctggactcccgagcacctagcggggcggcggccgatgcccggggccagcgccccaagccccgcccgtgcgccccggcagcccgggaccccctatcaggaagctagaccgcgatccgcgccgctgcccgtttgtaccgttgccaaaagggagaaagggattgtgccgcctccccgccccccggtcgccgcttctgcccctttcgggagcgcgtaggggttctctagtccttgttagactgctgggaggctccgagcctctccccaagcagccctcagggaagctcattgtgtgtgtgcgtgtgtgtgtgtgagcgcgcgcctgttggggggagctgtgtccccgaacgagctgctgttgtcggctaaggtgccactcccctcctccagagtgggtggagaggggctgttgagcccccagccccgggccacagagctccgagacgttgcggcgggcgcctgcagctcagcagcagaggccgagcccgcgctcatccccccacctgccccagcgcgcgcttctttgtagttcggccccgcgatcgataccccctccctctcccctccggccgctggcaaaggtcacccgagaatggcgggggaggggcggccccggggaccctcggcccgcgccgcccggaggccttcacaccccgacccggcgcccgccccgcgcagtttggtcgtggctcgggtgcgcgcgcccctgcccgcctggctttggggttttgtgtctctcatgtccacttctctcctctctcggtcggaacacactggtatctctatgtttttctcttgctctccgttttgctcttgttcctgctcattatctcttctccctgtcggtctctccgcctctgtctctgtctcatactcagccaccggccccctggggaccctcctccctcctccctcccagctgacaacagctaagtccacacctgccctctgacaggcagcccggccaggcccccatttcctaggtgggggtgtaagggtgcaggagggcccctggcctaggtgggggtttctttccctggtggtgctggggagggggctgtccacccgggccacagggacaatagccgcggcggctggcgcctgatcgatcgcttctccgagcacaagggcgagaaaggcgggggctctgggaggcgccccactagcaaagaggcagaggggcttgcggctgtgcccccaggcagcccgtccaggcaggggggctgggcgaagagaggacagcggggtgtcctgtgctgttcctccctagaaagccattccctccctccaccccaggaggaccagacaaccccctgggagcctggacccacaggccggcctcagtttcccccttctgcagagcaagcaaggtgactagctggaacctcttatgggattcttagatttttctgctttggggcacgggaaaataaatagtctttcgcgtgtggcagggtaaccttgtgctcagggaggtccgggaacctggacgatttcagtctgtcctgctcccctccccatgacacatacagcggcactcgtgcgctcaccatagaccggcggtcatatccgcacacagccacggccctcgaggtgcagtgcgaggcctcaggtggcagagggcacacccctggcagctctatttatttattgagacggagtttcactcttgtcgcccaggctgtagtgtagtggtgcgatctcggctcactgcagcctctgcctcccaggttcaagcgattcttccgccttagcctcctgaatagctgggattacagacgcccgccaccacgcctggctattttttttttttttttttttttttgtatttttagtagagatggagtttcaccatgttggccaggctggtctcaaactcctgacctcaggtgatccgcccgcttctgcctcccaaagtgctgggattacacaggcttgagccaccccgccgggcctccctctgacgtttaaacaccaactggttgccatcacaccagtaaggcagggacagtttctatagcccgatacccaccacctcctgcctcctctctagcacatatttgggggacattgtgtccaccgtgggtgcacccagagtccacaccactctccatttttcccactgtcacgttatgtaactaatgacccattagcagtactggaattgcagatttgggggccacagaaaacatcagccagagcgtcacagaagggcaaaccgcaggcgagaagtcccatggggggggggtgggctccccgcagccgggtcagcagcacccagcacccgccctgagtggacaccgcctgcttcgcctgcacctgaccctgcacccaggtgggtgttcgctcctgccgaccccacagccatccaggcctccgccgtcccctttctgccacggggagagttgcagatggggaaacaggctccgtttgtgcctcgccttcctgacttgtgacaatgacaaacagtctcagctctgggagtctgggtttcctgtcgaggaagggagagttagaacagtcgccgtctcaggggtgcgtgggggaaccggaggggtgagcgcagctcctggcaccccgagcctcccgcagggcgctggggcgttgaggatgataaacccggaccacgctgcccgcctgctctctgccgggtccgctgcccacgccgtggccccgccgcgcggccccgcggccgcggggttcacgccgtcaaccttgcgcacctgtcgcgtctcaggtgccctgggggccgcgtctacaccaccggactccgcctggggcgtaagaggtggcgggggcgagggccgcggggtcactaggctccggcccaggcctttagttccggtcgctgcgcaaatgaaaagcggttaagtggcggcaaatcgcggcggttagggggagacggccggatgcgtccccatctccacctaacacggcgacgccccaacgctggtgctcggaaagggaactctgcccccgccccgcccccgcaccatttcaaccccgcagcagaggactcgccgccctttctactccggcatccccattccccgctccgcgagcaccgcgggcctccccaggcctcctccaaggagaactttgcgccccgggtctcccgtcgcgcttgcccggctcggggcgggccacgcgtttccgcaggtgccgagtgtcctgccgggcgccggggccaggacagagacggggacagggagggagaaagacccgcaggtgcagacggagagggagggggagacggggagatggagagagagggaggggtcgcgagacaaaaccagagagtggggagggagagaccgggagcgggagaaacagacggggagaagagaaaaagaagcccagaaaggaacagaggtgaaggagagacgaaaagagaggcagagagaccaaaaaaaaaaaaaaaagagagagagagagagagagacagagatgggagaggaactctgggtgctggaggctgcctctgtgtccacccccgccctcccacagccccctccttcttccccatggggtaggacttgggagaggggaataggtgttttccttgtttcaccaaagcacgcaagaaatcccaccgcagacctcggagtcccggccccactgcccgttctgcgtgcctcagtttacccatctgtaaaatgtgcgtgtggtgggccgaattctgggtctgacactgtcagattctggaccccgtcgtctgggagtcctgcagcccccaagcccattcccatggggctgggagcctcaccctacccccaccccatggtcctccgagtcccgcacttcggagctgcctcctggtcaaagctctcccctggcgccgtctccaacagtaattatgggagaggggctgggggaggggcgggcgggctcctcggcgggggtgggggcggtcgatgaattcgaattaccgtctctaattcatcaccgtcgccgggtcgatagcttcggccgtcttcaaatattgtttaaattgcaactccggaggaaaagtattttttgtaactgatcagaaaaaaaatacgtatatagataatacaaagttagatggaggtggttgaaagaagggcctcatctcctcctgtgggcaccatggggaggcaggagcccagaatccctgagggatggtggagcccagcatggaggaaactgaggcagggaggaccccccacccccaccccaggtggatgggatgctttgcccttaagcagaacgaagtgtcctagggacaaaaaccagagctgtgtatggagttgcatgctgagggcagctggtgcaggaattgggcacctctgtttggtggtgggtgagcaggggggatgccagggactggggacctgaggggaaggacatggaaaggaaaaagaggcagaacctcttccccacccaggctcatacaggccctccctccccggcttctcccccctacccgctgccaccatcaagggctgaggttgaaatgggcgaggcaatctgggagtcccccttaaagggacaggtgtccaccccccacaagcactctggaacccccacccaaactctggatgaaggggagggatgagcagggagaggaggaggaggaggagagggaagggagggaaggaaggggagagaggagagagggaaagacccctgtgccttttgcaaaaaccccactttccactgcaaggggtccacgcctcttacggacacccccagaaaaatatgccccacgccactagacagtagagataaccaaggttgggggcttggagacccgggccttccctgggctctgtccctggctgatccctggcaaaaggacttgagcctcagttttcttatctgagaaatgggcagaatgaaatgacgcctaggagagggggtatgaggggctggaggggctcaggggtctgaaggggccaccgtaggtttccacagggatgcacggagtgtggatagaccgagaccgtgcccagggccacgagaaccagacccacgtggggctgcgcgcgagactcaggtgactctggtgcccccacaccagcaccctcccacaaaacttcagggcccggggaggagcagccctagctagggacctgggccaggatcagggatcaggctcccgcctcccgtgcagagggggagggagatggggaggggtcccactggatgcccacagcccttcccctcctcctcagctcacctgcccggaacgacattttgaacccgatgcggttcccatgcccaccctacagaccagcaagctgaggccgaagagaaaggcgcttgccagagccccgcactgcttctgatgcggagtcagcttccgctaggaggggccgtaacaggaccagggcgtggctttcggctgctctgaccccgctgagtctggtgggcctaacactaggctggagatgcccaggctccctgacctccagcagagatgggggagcattccaggaaggtgacgcttcgggacgaagtcttggaggtgtattgaggtcaaggaccacagagaagggaccggcgggggggcggggggtggcactttccacgttctcagccacttggccgatcctcaggtggggccaggtgaccggccagttccacctccccaccccacaggagccacatcctttaggggtggtgaggcctgcgctgcgcttccccctgtgccccagctcctccaagtatgatgatgttgtgggcatgtgagtcctctcacctgggagaccaccggagactcccagagaggatgggcggtgggggggggccaggtcccagcctcatcgagtccagctcagagcccccaggaccatccccgcttttgcttttcccagcagacctccccctcccaacgccagcctcggtcccaataattcctttctgtagcctgggagacagggacgctcgcccccaacacagaggagtctgggggagtctcttgagtggtgaggggctggagctggcctttggctctgaagtcctcttagcctgaagtcctagaagtaatcatgaccattcattcttctctctgaatctccctcccattccgtgctgcttctccaacaaccattaccactctagtctaaaccactatggtggtctcctcctccacctccatcatggcttcccagctccattcctgctctttttttttttttttttttttttggagatggagttttgctcttgtcgtccaggctggagtgcagtggcgcaacctcggctcactgcaacctctgcctcccaggttcaagtgattctcctgcctcagcctaccaagtagctgagattacaggcatgagccaccacgcccagctaatttttgtgtttttagtagagaccgggtttcaccacgttgaccaggctggtctcaaattcctgacctcagatgatccacccacctcggccacccaaagtgctgggatgacaggcatgaaccaccgtgcccagccttctcctccttctcactgccgtctcccccacatcctaagggagctttgcatggccactttgggttggcaccccgggttggcaccctgccccgtggctccccagagccctaaaatataaatgtggtttcctgtggtggcctacagtgcctgaccctggcctcctgcgtggatgtgggaggggacttctggccggtgggaccagcagggacaaaggctgggaggtgggaaagtcctgagcagctgttaggagggaggctgagccgggcaggtagcccggcttacccgggagagctggcgctgggtggaatcaagttcttaattaaatatgggccctgatcaatagggagggaagcactggtggggtaggggagaggctgaacaaggagccagggagacccacctgaccttgggcagccttgggacacctacggcctcagttttccctctgccaagtaggtgctaatgtgagaggggctgagaaaccggcacccctcctgagtcccgagtgtgggcagatgtggggggcgatgggggacccctccgagctaccaagtcatgacctcagagccacagattcacagaagagagaaacaaagactggaagatgtgcctggcacaggctgctggagaggcgtgcccgggtcacaagtgtagacgcacccggagacacgtgtgtagacgcctccgttcacactgggacgagtgcagactgacccaggacccccatccgccctctggcagtcttgagccagcaactcccctaagtggggtgcggggacatctggaagacgccccatctccccctggacgcagtggctgcgccatctggagaccctcgtgctggctgctgggggtcctgcgtgccttccgcgcgcccccagctgcgcccgccagccctccaaccctcctgccctcctgccctcctgccctcctctctgggagtcgggacagaagctgctgggctctcctccctggagctggggctttgggaaggtcgagtagaccctcagtgagtgggatgcgcgagttggggacgctagttgcggggcagcaggggtccacgcatttccaagcgccctttcccgtccaaggacctgctggggggatgactgtgcctcagtttccatcacccagcaaacgccgtcccgcagcacccgggaagctgcggagtcgggctggggccgccgcgttgcgcacatcggtccttggcgggtgtgtggatcccagagcgcgcccggcccccaacagcctgacaggacctggacgcacgtgccccggcgccaggagacccgggacccgggaccacgcgcccgcggccttggagcctcagggtcactggtgcgggctccgcaggaaagcgcagcccccagcaggcacccaccatcccacccccgcatcccaccccaggggaaaccgcgccgcaccaggcgcgagtgttcttcttccttgtctggcgccccagaaccgcggccgtcctgggtgcgctcagctccagcgcagtgggaggacaagacacgttcctcctcccctcctccacctcccttgtttttgctccctggttccctaaaatattctacattcttttggcccggcggggaggctcaaacctgtagtcccagcactttgggaggccaaggcaagaggatctcttgaggccaggagttccagaccagcctgggcaatagggagaccgcatctctataaaaatgtttttaaattagccagatgtggccgggtgcggtggctcacgcctgtaatctcagcactttgggaggccgaggtgggtagatcatctgaggccaggagttcgagaccagcctggccaacacggcgaaaccccatgtctactaaaaatacaaaaattagccgggcgtggtggcacatgcctgcaatcccagctactccggaggctgcgacaggagaatcgcttgaacccaggaggcagaggttgcagtgagccgagattgcaccattgcactccggcagcctgggtgacagagtgagactccatctcaaaaaaaaaaaaaaaaaaaaaaaaaaaaaattagccagatgtggtggtgtacatctgtggccccggctactcaggaggctgagccaggaggatctcttgagcaagggaggtcgaggctgcagtgagacatgactgcgtcacttcattccagcctgggcaacacaggctgaccctgtctcaaaaaatgataaacaaataaataaatcgacatgattttacaatagttaacgcattcgccagtttccgaatttcaatgcaagatgaggtggcttccattgccctcccttctgcaaatcacagtctgtatttctccttcttgcaaaaggctgcgctccagggataaattctttttatttcccttttttgttttttttttttttttaacagaaaggggagcttcagatgctccgagattcttccccccggctcagatccgtgaagcgcgcatcctggtcatttttgccggccgcctagtactctctgactcggcggtggtttcaggttttcctgaaccacttccccgccccgctgacatttaggctgtttccaatcgttcgcggtcaccatagcggctgcaatgaatacgtccggggcggatcattttacgagtgtgagtttatctgtggattaatttcccaataattgaaacgctgggtcagcctccccagcccctttctgggtggccgcttcagccgcttcttatcactgattcctttcctgtcatctttttcaaatccatttcccactgcaggcgctgtgtctccgtaacattttttttaaaaatcaacgccttgtgcgtgcgtgtgtttgcccactggctttgctcctgtttgagggtgcctgaatggggtgggtctctgtagctgaatgtccgagggtgagaggtgccccctgacacccccatgcccccaccccatggcggcccagcctccagatggagccacgagggagggacagcccgagagtccaagtggaaatgcgtttcccggttaagtctttgaaggctcagaactaatttgaaaatgcagtcattaaaatcccatcaggggaggctggcggggaaagctggagggagaggggtggggacaagagggaggctgggcgcctgctgaggccaaggtgggctccgcgtgagatgtgggcagggcaggcatggggagggtaagccacccagagtggaggggtagtgggaacagagtggggccagatgaggggctggggaggcctctgggggtccacgcctggggcatgactcagccccatctccttggagaaggttccactgcctcccacccatgggaatcaattttccagctccccgaggggtgcagggtgtagacagagggtgtaggtatgtgacccgggccccccacagtaactggacatgtgaccttgggcaagtcacccactgactcgagtctggagaggccacgggggggggatgcgcaggggggacaagacaccagcatgggggtggggggcatcagtacaacccacatctggggcagggcagctggtggcggggacaggacgcgtcgccaaggaaaccggtcatcatcccagccggagaccgggctccatattgaattgtctgctccctgaagccagaggtggctgagggaggggatctccagctccaggacacagggaggacgggcacacagcggggtagactcacgtggcttggtggtttggggcactgtacagactgtcgggcacagagggacatgggatggtcacttgaatcgcccattgctgcatcctggggcgtcttcttctcccttgggcattgcccagctggtctccatctcctctagttgctctttgatctcctccctggaccttggggaccccccaggagcctccacatccctcccgtcctggtgccaccctggcttgtgtctctcctgccgtgccgcccccagcactgctggcgtccactgggattcagggaccttccctccagctgtcccgaagcctgggcctggtcttctggtccatcctccctcccagccagcagtgtatccactcgaaggcctcagagagcccagtggagcccgcgcctcccctccagtacccacccaaaggcgtcctctctccccctttcctggactcagagcggagctggcctcctcattggggaacagagtcccaggcagccgccgcttcacgctgtcctgtgactgtgagtggaggccagctcctggagctgcctctctctggcctcacgcagcagctgctccctgaatggtgaatggatgagtcggttgcaggtccgtgcttcggcgttcattccttcgtgactctcgggactgcggcccggtggggacacagggctctgggtcactgcgtccacttgataaaccaggaacctgatgtccagagaggccagggtgcgcgttcaaggccactcggcccgcagagcccacccgcgtccccatggctgcagtggtgaggggagcagggggaggcagagaggagcccaccctggggctgggcggacatggatgcgtaacccacaccgcaggcttctgcggggtgacacccagactcaccccaagaccctgcacaccctacagctctcacgtctcacgtccacaccgcgagccagctgcatcccacacagggatgtcacaccaagatccgttgcctcatccaccgcccgtccaaggccccacaagctgatgccggttttcccgcccagaactggaacagctttcctaacggtcacaggtttcttagcttctcacttgggtggggtttggatgtgcaaggctgccgacccccatcgtggttgagcgcccgtgcaggcgccacccacccacccacagcacctcgctcagacttcgccctccaccccgccgggacatttgggaagcctcaggcagccccacgcgggcacacccgatggtggacggaggctggcaccctcagcccgcacgcggccaacgtcaggcgcgcgcagaggcacccacgggcccgccttcaggggcgaggcggatgctgcatcctgaagccctccctgttacaagcccagcccctccaaaggcctctggatgaaggggaggatgaagggggagagaaggaggaggagggggagagggaaggaagggaagtgagggaaggaaggggaagaggggagggaggtaaagagagggagggaaggaaagggaggaaaagaaaagagcagagaggggagagggagggagggtgagtggaaaaggaggggtgaggaggaggagaggggatggtcccctcttggagggtgatgggggttgacaggtgggccccagcttgggttgcagcaatgactgaattcagggcccctactcagctactggcttcctgctgagggcactcggggagccccactgtcccacccggcgctccagggcagtggctactggtcttccgcagcagggtcttgcaggctgggctgagaccccccccccatgctccaccaccctcgtgtaggacaacccaggaacatgttagtcactgcacactcactcagccactgctatacctccgctctgtgctgggccacagaaagatctcaggccccacgaggctaaaaggaggaacagtggcccctgggagtcccagaggaggggccccgggctccgctgcggggggagggagggacttcctggggagaggccattgctcctgggcgttgaggaatgtgtaggagttctctggctggagtgacccaactttctactcttggccccagtttctccatttctcccctctccaggaagatcctgagagaaaacctgaggctcaaggccttccttgagggagggggaaacttcgtggttggaaggcaagtgtcgcccagagcccagctcctctcagggacccccagatgggagctgggagcctcttgttagccctgccgtattcattcaggacttttctggctagacccttccccacagcccaaccatgatcaagaccatcttacagttggggaaactgaggctaagatggtccaacaccaggcagggcccaagagggcagcaggtcagaccaccctcttgggccccggggtggttggctgtccccagcaacttttagaaaggcaggaagtgggatagagctggtgtgtgtgggccaaatcccaaggggtctgcaggaaacgccttcatccggaacttgagggtctccccccagtccagccccctttcccccgcatgagacacagcctacagcccccgccctttcctgggttggggcggggacggctgccctctgctggacacagcgggaacagcagggataactgagcgaaggggcggccacatccccgggacctccccgcccagagatttcctgatcccacctgcccagaaaagaaaacgacccttgttgatgctgggggcggcggcgcaggcccaggacggtgccctggggcgggaggctggatgctacagtaaagccaccatgactgcgtttgccgggctccctgtgcatgggctcagatgtgggcatggggtctccgtctcttctagttgatctctgatctcctcccagggccccggggacccccaggaaccagccccagatcctcctcatccttagattccaaaaagactgataaccgttggggagatgggatgggtggtgtacctggagtcctcagatcagagcctctcgggggtgattgctcctggaatcagggcctcagtccccagggtcctggaggaggtgcagggctggctgcatggagtgggcatcctgtcaggacccaaaccctcactcaatggggcccctggacagagcaggtgaattgttgtaaaaagaaggggtgtggcaggggtgacagggagagttgtgggattagacaaggggtgttggggtagcctcgcagggaaggagatacctgagcagagactagaaggagctgaggggggcgggaggggacttggggaagagcaaccaggcagagagaaccgtcgtgcaaaggagctgagtgagtgaggccagcgggggaggccagacagagaggcggctggtggtggatggggagagggaagcggctggaagagctcaggagcccaggaaggactggcctgcaccgggacatgcctgaagggggcgcactgtctttacaaaggaagggactgaggcctccaagggaatgggactcgcctggggtcccagagcaagcttgacagcctggccccgccccactcctccgccagcttggtggccaaggtctgtgttgggggccactctctatccccccgactacaggtcgggagctgctggtgatggaaccaggggctgagtatgcagtgctggccacatactaggagaatcccaggatggggttcagcagtgttgatgaggataatgaaggaaatcagggggaggtgaagaaaacagaggaagggggtgagtaaaagaaaggtcatggaggaggtgtggggaggtggaaggtggaggtgatggaggtggtgatgggggtggaaggtggagacgatggaggaggtggcggaggtagaggtggaggtggtggaggtggaggtggtggaggtggaggtggtggaggtgaaggtggaggaggtagaggtagaggtgctggaggtggaggtaatggaggtggaagtggaggtggaggtgatggtggaggtggtggaggtggaagtggaggtggaggtgacggtggaggtggtggagttgctggaggtggaggtggtggaagtggaggtggaggtgatggaggaggagatgctggaggtggaggtgatggagatggaggtggaggtcgtggcggtggaggtggtgaaggaagaggtgctggaggtggaggtgatggaggtggaggtggtgaaggaagaggtgatgaaggaggaggtggaggtgctggaggtggtggaggaggaggaggtgctggagttggaggtgatatggagggtgtgatgggatagcactgacattggtggtgcaggagtgatggtggaggagaggacggaggtggagacctcattggaggctggtggaggtcgcgtggcagaggtggcaatggtgggccctggcagcatgaggctggtggttggtaccagggccaagtccagggcttcacccccgtccccactctgaaccccatcagtccttctctccaagtctcagttttcacttctgcacaaggggtccataaccaccatggcctctgggttggcacaggggtggcctttaggattggtgtgggggtgaacctgatgttgggtggggtgctggcgggggtcaggtggcggtggtgatgggtaggggatgcacagagggggcatccaggcggcccccctactccaactcacacctctgtcagcggctgtgggggatgggagcaatgacaaagctgctcgcggtaaacagctccgactggatcgatctgggctgtgaggagctgtaattagattgaacgccgggaaggggggcagcagagcctctttttgctgcaatcgacaaaacgggaagttttttcagactctgcctggcccggcccctcccccagcctctgcctctggggtccccattaggcaccagattggagcctgggaggtggggtgggaaagggacgatatgcatcctacctccctcccccatctaggccagtggactctgttttctgggctgccctattgggactggctgggcaagcctgaggggtggctcacattctctgagtaaataaggagaaaaccccctgccttgtagaattattgtaaggattgaggctgggtactgtgattcatgcctgtaaccccagcactttgggaagctgaagctagaggattgcttgaacccaggagttagagaccagcctggacaacatagtgagaccacatttctacaaacaaacaaaaaacatatatatatgtttgtgggggttttttgttttttgttttttaattagccagatgtggtgatgtgcacccgtggtcccacctacttgggaggctgaggtggaaggattgcttgagcccaggagttcaaggatgcagtgagtcatgattgcaccactgcactccagcctgggcgacacagcaagaccctgtctcaaaacaaaacaagaattattgttaagaattgagtgaccagatacatataaagctcttgacacaaagctcttgtgagctttctgaggagcatttgtatttctgtccctactgtaaatgtaggataaatttgtgagtaaattgctaagtgaatgaataaatgagtgagtgaatgaattaaacattacaacaggtgagcgagaagggcctcccttggaatttcaaggccccggttgagttttgactcagctttccctttgaaagaatggaggactgggtcctctcctgtaatcctcatagggtggccgagtgccaaagaggtgagaggtcaattcagttttttgcatttccttccatgtttctttatgcagataaaatataaacataggttcttgtctctcctttcacacataaaaggctccctggtacactgttcacccttcaggatttcctttgccatctttccagattcatacccatactctccctctctgtcagtctctcaatataattacaaatacagtctgttgcctaaattaacatttagtaattaacattattacgcttttggaaaacattgtccacagctgagccatgtagagtactaggactgcatttcctttcctgtacaactctttggttttccaggagttgatagctgccaaacaaaaattcttcccacgctccccaacaaaatttaaaaccaactcaataggactttccacacatattaggtcatctctgatctgggtggggctgccctccataccctgggtccttttgtctagctgtcttccagggtccccctcatcctgatttggaggaccccttttctctttcagctaggttggatcacattttctgaatcccacaccatcctttttttatttacctcctcgtttgaatggaacacatcctccagtagctttctgagaaagggtatgtgggaagttaagttttggagtccttgaacatccgattatatctttattgcaccttcatgtttggtcttttgttatttagcaattctagctgaaaataacttttccttggaactttgaaagccttgctctgttgtctgctagtttttgcacacccaaagctgcttggattcttgatcctttgcatgacatctggctttcctctaggcgctttttaggattttctctttattcttggtgctctgaaatttcacaacaacgaggcttgagtgtctttttcattcaatgagctgaggacttgatgtcccacccccatttttttagagctggggtctcgctctgtcatccaggctggagtgcagtatcatgatcataactcactgcagccttgaccttctgggctcaaatgatcctcctacctcagcatcctgaataactgggaccacaggtgtgagtcaccatgcctggctaattttaaattttttgtagcaatggggtctcactatattctccaagctgctctcaacctcttgggctcaagtgatcctcccacctcagcctcccaaagtgctgggattagaggcatgagccacttcatccagcctatttagttattatttatttatttatttatttatttatttatttatttatttttgagacggagtctcgctctgttgcccaggctggagtgagtggtgtgatctcagctcacacctctgcttactgggttcaagcgactctcctgcctcagcctccccagtagctgggattccaagcacctgccaccacactcagctaattttttttgtattttttgtggagacagagtttcatcatgttgaccaggctggtctcgaactcctgacctcaagcgatccacctaccttggcctcccaaagtgctgggattacaagaatgagccaccatgcccagtgggcctatttatatttaaaaattatttattttaaaagagagtcttactctgtcacccaggctggagtgcagtggtgagatcatgctcactgtagccttgaacccccagcctcaagtgttcctcctgcctcagcctcccaaaatgctgagattacaggcatgagccactgcacctgaccacatttaaactggaaactcatctttcaacgctagattttttttcattatttgatcatctcttcctctatttttgaactgtctcttgatcaggtgacaaccctgcttcatcttaattcatcctctaactttttattctctttcatttcccatctttgcagctgcttgtgttccattttctgggatatctgctttactcttttttttttttttttttttttttgagatggagtttcactcttgttgcccaggctgaaatgcaatggcacgatcttggctcaccacaacttctgcctcccagattcaagcaattctcctgcctcagcctcccgagtagctgggattacaggcatgcaccaccacgtccagctaattttttttttttttttttttttttagtagagacagg[148 bp omitted]ttttactctggctgttatatattcacattttaagagcatttcctcactctctaatggtcccttttacttaacagcatcctgtacttgtttcatggatacgatatttttctcttactcctctgggaatattaattatagctttgcctgccttgtcggttccttctgagtttattcctcccccaccaaaccatttttctccattgttctcccccctcctgcctccctccctctctctctctccctctctttttcatgttagacgcttttctaaaatgtgcagtaacccacaggcatcacttgcatttaatcataaaacctgaaaccgcagttagaagccccacacattccaggtcagagggagtgaagtgtgcgtcagctcacaccctagacgggtgaacctgttgtccccgagacatgagtcatggcagaaggaacattcatttatttctgtggacgtgtatggacattgatctagcatgtcatgttccaggctgttctgcaacgaaaagaaaagctctctgtgccattccagtaggccacgacggctggcacagagaagagactgggagcagagacccactagtactacctgcaccaccggccacttctgggggtcacagagtagctggaactccgggatggagacaagggcaggacagcctcttcagcaccacagtcccagtctggatgcaggagagaaattgagattctgatggagtttcaagctgatgccacaaatgagcccatctgacttgtggcccagctcctagtgggggaagcctgtgttttgtacccactgacacccactgcattgaggggaggggttcacttcgctgctggagcaggaagagcaggactcggcttcagccctgccccatcaccccgagcctttgcttttctcccctttgcaagtgtctggtctgcaggccatggggcagcctccttcagccctctccgtgatctgtgcgggctgaccaagaggaagggtgacctgctcatctgggagaggaagaggtggtccctgcactctcccctcctcctccaaagtcttctttcttagatgttctgcgctccagagggtccactgggtgctcgagggaggccaagtctgggtggtctcagcctgtggataggggcaggagcaggaggcagggattcagatgtcggaattgggctgtggactcacagggtccctaagggtatcaggccttacaggagtgtcgctgctgctcattcgtagagcttggttgtcacagccagttgccatggcacacacctgtaatcccagtgctttgggaggctgaggccagaggatcacttgaggccaggcgttcgagaccagcctgggcaacatagcaagacttcccctccgcaaaaaaaaaaaagaaaagaaagaaaggaaaggccctggttagcccaccatttctggggaaggctgctgggttttgtgatgcaccccaggacctagtaattaaccagttatttcacccaagtctacactgagccaaaaactctcatgtgcagtttccatgtcatttccccaacacccccaggttggggctgcagaaaggagaggagaaagttaccaatatcaatttctgtggtcctttaggtagggagcgtttgagggtaggacggggtttggggggtatgaggcttggggggtgcctgagtgggctccatggagaagggggctggagggggtggtagccatgcctgcagaggggcactcacactgtgtccccttctttgtcctccccccacccccaccgcatctgctttccctgcctgtcctcgccttccattctgtctccaccgccctctggctgcatcctggactttcctgttgtctccctgttgaccttgctgtttccctgtctctgtctctgtgcgtccctgtgttccccgctgtctccccctccgcctctccctgcattcttgttgcttctgggctctccctgggaccttatgtgcattcgcctttccccaacgtgtcccttctcccctcctcctcatcctccgggcggcgtgcgcctcctgcctctccccggccggccacacggtggcgctgtgtcccgctcgcccgcccgcccgccgctcgcccgcagcctgcaagcgcaaggaacaggagcagcagaaggagcgcgccctgcagcccaagaagcagcgcctggtgttcaccgacctgcagcgacgcacgctgatcgccatcttcaaggagaacaagcggccgtccaaggagatgcaggtcaccatctcgcagcagctcggcttggagctcaacaccgtcagcaacttcttcatgaacgcgcggcgccgctgcatgaaccgctgggctgaggagcccagcacggcccccgggggccccgccggcgccacggccactttctccaaggcctgaggcgccccggccccgcgccctccctgcctccacggcctgggcgctgtgcccccacgtcacctccccacatcctgccggcccggagacccgcccccagggggcacctggagggggtgctatccgggccccccacacccggggagggggaagcagcacaccccccagcccaagtgcacaaaaagggccccccttcctccctccatgcccactccctccaggccaaaggaagccctccacccccccccggaggggagggagtgacagaaaggggtttcccagccccctctccattcaggacgcccagagggcctcgagaaaaaccagggctcactgtgttgtcccctaaagcgggtcaagaagcacatactagaaatataaaccgggtatttaaaaatggaattttaaagaataacccctcctccgtcagatcccctgccccaccgagggaggtagtagaaaacttccttcctccccacccgccccggccccctccccagggacctcagccctttccaaagtcgccaaaaacccacatcaagccggatccttacggtcccccaccctctccaaaaccaaccccacccgctggcaggacggcccctgcggccgagaactgagctgcccctctctgcggccaggattcctcgtgccaagaatcgcctgccttaaagtctggggaggggcctgcggcgggcgcccagcacctacgggcgagcacccttcccaccccatcccaggccgcaggggacggggggctcccacgtgcgggtaaattccagacgcccccgccccgccccgtctgttgagttcactttacctttaggcaccttcgtggagcgcaaggaaggacgcagctccggacacgggagaccacgcccaggctcccaggagaaggggacccggccggagaaggcgccgctggggccgcccggaggagcccctctgcacgggcccgtggagacgcttcctgcgtggaaccttctggaatccaccgcccccctttccgcccgcgtcagggtctgaactgggcttgcaggggggcagcggggttgaacgtggtgttggtttccactctcgccaaagagagaagacgccgaggaaggtggattccgcttgctccattttttgccaaaaatatttacaaatgggaagggtcggaaatgaagatgagcgcccccctcccaccccgcgctctcccccgctcctctcatctggtctgggtgacctccgagactggccggccgcgggatcccaggagcccgcctcctccgggggttcaagatccgagtctagaaggaacctcctccctgaaatccccccactcatcggctgcctcccagggaggaggcggcccccctaccccccttgaaaatgcaaaagacatttctagtgaaatgcccctcccctcccccaggtaaaggctacctcactcaagctcatgtctgtgattggaaaatcacgcctgataccaaagatttctcccaaggatttgtgctggatgacaggattccctggcctgggacccggctcggggccccgcctgccgagtgccaccccttcccgaacctgagagcgaaagagagagagagagagagggagagagagggagagaaagggagagagggagggagaggatcgtgaggtcgaagagtgccttcttcttgaaccaaagacgtgtatggagtgttctcttgtccttatcgacttgctctgctcccagctttccaagcgaccggatctgagtgatgcttctagaacatttgggtgttggggggttcccaatagtagaaagggtccccattcctgctcagcaccgcacctctctacccccccacagacacacatgcagacacacacatgcagacaacacgcagacacacacatgcaggcactcacatgcaggcccatgcacacacacgtgcacacacatgcagagacatgcagacacgcaggcacacatgcacacatgcaaagacacgcatgcaggcacacgcagacgcacacagagacacacatgcagatacacatgcacacacacatacacacactggcccctgtttttctgtggtgtcactgggtgccagcaactcggtatctcccacctcccactaaaacctgggccttaatttctctcccgtccccacccctaaattcctgatggatgaacctagagctgtcctgtccactccaggccggactgacgtagcctatgggcccagcaggtccagggcccacgttttaatttctttttaaaaagctttaggtcttgccgggcgcggtggttcacgcctggaatcccagcattttgggaggccgaggcgggtggatcacaaggtcagcagttcaagaccagcctgaccaacatggtgaaaccctgtctctactaaaaatacaaaaaaattagctgggcgaggtggcaggcacctgtaatcccagccacctgggaggctgaggcaggagaatctcttgaaactggaaggcagaggttgcagtgagccgagattgcgccactacactctagcctgggcaacgagagcaaaactccctctcaaaaaaaaaaaaaaaaaaaaaaactttaggtccaagaagatgcaccccattcaacataccatattatttgtctttataccaaggtagcctatagatatacaatgttttaaatttcttttttagaaacagggttttgctctgttacccaggctggagtgcagtggtgcaatcgtagctcactgcagcctcgaccacctgggctcaagtgatcctcctgcctcagcctcccagtagctggggccacaagcacaccccaccatgcccatttaattttttaagggatttcttgtagatatggggtctcactatgctgcccaggctggtcttgaactcctggccccaagggggtcctcctgcctcggcctccaaaagtgctaggattacaggtagatagacatttagtggaggaagaggctctcaaaggcaataaaatgcttctgatccaagagaatcacgctgcagccctggcccagtgagcttcttagaaaatcgatgcctgggcttcaggcactggccggagcacgggcctggcggggtgctgggtctcctagatgccctctgcttggccttcaaggccccaagggtaacacgctagggggcctccagttttgtcccctgctggaaatttaggacttggcttgggatcgttctggttgtggaatgttttagctatgctgaactgtggtcagatcaggtcaagcctcttggtcacagaagtggcccagcagcactttgggaggccgagacaggaggatcgcttgaggccaggagtttgagaccagcctgggcaacacagcaagaccccacttctacaaaaaaaaataaataaagtggcccaggactcctggatccttttcagatatcttcgtatcacacacacacacacacacacacacacacacacacacacacacacacccctacctgtttccggaccccaccccaaacttggccagacccccacagaaggctctatccccgacctgcccgccggcccctcaggccctctcctgcctccccgcatgcccacttggctgtcacataccaaagagcatgcgttctccatgcagggatcaacacctccagcacaattccttcgagcctttgacaattttctctgaaatacctcaaaatatttaatgtatagtttatgtgattaaaaaaaaatccttagctagtttttggaatacgtgacttgaagctttataccgttaaattataattttgcagacgatggcatgtcgtttctttgacgagttccgtgggagacgcattgaatgtcagggctggagaccagagggaaagttagagggagcgtgatcgcgagagagactgcggcagaaaggaccagtggcgtttacagatttcttatttaaatgagtcctttaggaaagaaaggaagagagagagagagcgagcgcaagagagagagagagggagagagagggagagggagagagagaggcagaggtatacctttctgttctctggcttgttctgtttcttgttttctggagtcatgtcttataagagtatttattattctctgtgttctgtgttcaaatgtaatttaagaaaaaaaaaggaagaaaaatgcaaaaaaaaaagacaaaatggaatttgagttggtgcatgactaatgtactctttcttgacgctaattgtaataaagtggtcagggtggggggcggggggcgtggcccggttccgtgtcgcatctgtgtgtctggtgcctgatcggtgctgttcagtggtttttcgttactgtttctttcctcctttctaaggaactgtgtccagccgggacaggtggacggggccccaggtagagggggcgggaacagagcctcagtagccgggtctcctccacctgcctgtccatctccacccgagatgccacctgcctgccccagccaggcgggagccaccgagcgtccccccctcagttcctggttcttgggggcactctggtgtcatcgatatcttagacccccccaaccccccatcacccggttgctttcactctagcatgaattcccaagtgtcttgttcagaggagacagacaatcagcctattcttgtcttgttgcccagggtggtgggggacgggagtgtgccccaacttcctgagatctgaaggaccctcctgagggccccaacagcaggcaccagcaccccctccccccccacctccacccagacagcctcggcctccctccctgggctgggcatgagtccgcctttctgtccagcccgggaggcagggggtgtacgcctgcagagacccctccctcccagcccactttcggagcctacagaacagaggactccccaaaatcatcaaagggggctctgggacaatgtcctctgcctctgactcctcttgtgccatgaggccacgtccctgagccatccccagatagtccctggaggtggaaaggggcacagatgtgccagcttgggaacagaggctggaggagagggcggcaggggagagatgagaggggccgcttttgggacaggccccagtaggggggggcggggtagctaaacggggtgcttctcaccccataaagcagcaagccctggtctggagggctgggcctggggctgagggctcagctgacctcaaatctgaaatgatgccggggccaggatgctccttgcaccagcaggagcttgggccatttcacattctctgccccaagcggtttaagcaaaatcaggccagtagactcctggggctcctcctcgtggccctgtcagaccacgcaggggctggttttggtggaatgagctcagccgggggtgacggaagagccaggaggccctgcggccttgagtgttttgaatagactggaactgagggctgctttcaggggagacaccacttggaccctccaaagtcccctcccctccagggacaggggagagaagcccttttccaccttcacccttgggcgacaggcttaaaagctaaaaaaaaaaaaaaatctcgtcattgttaaccattgctgtgctgggtttgttgatttgtttttcttcaataaattattttctagtcactcacctgggcgtgtgtgttagctgacgggtcgggcacagatagggggcgggaatggaactcgcccacctcgaggctggggagggaggaccggagtgcagggaagacggactttgcttccacccagctcgcccctctctgctctgagtcccgtcttcttcctgggccagtggccagctctgagcctccacaatccacacaactccaccacccacacaagtccaccacccacagggaatggtaagaatcagaaagaggccaggcgcggtggctcacacctgtaatcccagcactttgggaggccaaggcaggcggatcacgaggtcaggagatcaagaccatcctggctaacacggtgaaaccccgtctctactaaaaaatacaaaaaattagccaggcatggtggtgggcgcctgtattcccagctactcaggaggc[136 bp omitted]ttggcgccttagaaggaaaagcttggcgcctttgagtcaaccaagccccaagatgcacaccttgtcaggacctgcttctgtgacatcactgctcattgctttctggagtctaaagtgaacggaggccccagtgaatgaaggtgtatttgaatgggagaaaccagggcttcccgatagaggaagaagctagatggtacaagaactggaatttataaactttcttgggaggggccagctgtcaggcagcgggggagccacagcttttaataagcaacttttgagagcaatgaagctttacccacattatcttaccccagcatgaagaaggaaagttttccctgcaaatacccggctggaccactagaggtcagtgttttgattttaaaaaccgggaaggaatattccatcacaaaaaaagtgtagggaaagagggagcctgaattagcgctggggtcagatggaccctggtttattagaaaaagaaaagcatgtggagtccttgtctttagaggaaggccccctgcatgctggttgacttgcagcagaactggctggagcttcttcttcccaggaaggacatcttcctgatatgccagcgtgactcctttgggctcgaagatgcctcttcatcagatgggtctagggattcagatgctacgtcactgctgaaccctggtcccctccgcagagggcaatgactgctcctctgggggcaaggatagctgctcctccccgggcaccagcagccactccatggatgatgatgactgcttctccgcgggccacagctccacctccataggctgctcgctcgtggacgtggacgattcttccagacttggtggcagagtctccacctgagatttgtgggtcttgtctggaagtggcaccgtcccctccttgggggtgtgaggctccttttgccagctcttccggaacggtgtggagggcttcaaaaatgctgacttctcctccgaggagtctggctggctctccaacgtcagctggcctgaaagaaatgactggctccccagaggctgtggctggctctcaaatgacgacagctggctttctctgtgcaacagtgatttctcctgaaaagaatgtgacctctccttggtcaacagcaacttctcaggagaaggtggcctctgcttgggtgacaatgacctctcctgtgcccttggcaattgctcttggaaagactcagatagcctgttgctgctggtgagcacatatttggggagggcaggttggttttctggatgaagagcggattgtctatccatagaaaatgatgagctaggtgtaggggggagctgtacttcctgggaggacacctgcccctgtggctggtgcttcttcttccccaggaaggacatcttcctgaggtgtcactgtgactcttttgggctcgaagctgcctcttcatcagatgggtctagggattcagatgctatgtcactgctgacccctggtcccctccgcagaattgtgccctgagtgatgaggtttgcatatccctcacggtgggagaaagcatagctggaacggcgggcacgagactcccggtgtacatgaggcaagggctccatggtgaaaatctcctcgctggggccctcctccaccttctcctcctgaagagcaaaggggagagcaggggaagcagactcctatgcttggctgatggctctcaggtcccccaagtaggagaggcaggattcaaagcccttggccactattgattggctacgttcttccctacccaagttgagccaattagagtcctcgactctcagtgttgagttctaaggaggactctagtcctttgcttttcaagacccactaattggccttgccctggaaactaaccctggatcagccaatcagagttattccctgggacttaactcgggaccacccaatcagagtccttccctgggacttaaccctggctcagccaatcagagtccttccccgactctggaccagccaccaggtgccttggctgccctttggtggcaaatccaggagaggtgagcctgggacagccaggtgcccagcctgtgcagtaaaggtggcaggagctgggcagggagaacagaggtggcagggcaggtacaccattccagtcaattctggggcccatctcagctgcaacttgcttttccatgcatgctttggttacgtgggctagtaagtcccctcccttttttttgaggtggggtcttgctctgttgcccagataggagtgcagtggcaaaaatcatagctcactgcagcctcaacctcccaggctcaagcaagccacctgcttcagcctctcaaagtgctgggattacaggtgtgaaccgctgcgcctggccttgagcacatgtcctcaaggtgcatccacgctgtggcctgtgtcagagcctcactccttctcacggctcaggcgtgtttcattgcacagatggagcgtgccgtgttgacccactcatctgtcaacagactcttatttctaagttcctccttttgcctaaaccatttcaaggttgtttccgtcatctcaacccccaagctctagatcattcacggtagaatctgatggtgtcagccaggcacagtgtggctcatgcctgaaatcccaacatgttatgaggccaaggcaggaggattgcgtgagcccaggagtttgaaccagcctgggcaccataatgagtctccatctctagaaaataactacaaaattagctgggcgtggtggtacatgcccgtggtctcagctacttggaaagctgaggtgggaggatcctttgagcccggaaggtcgaggctgcagtgagccgagattgtgccactgcactccagcctgggtgacagcacaagacccttctcaaaaagtaaaaataaataaataaataaaaccttaagagcccgatggcatcagcactggaatccagggcggcgtttgggtgctctctgctgctttgtcgggggagtgaggtctcccttcttgggaaatcgggccccgggggcactgggcgtgtgtccggggctccgcacccacccttcccccaagcctagtgtcttggagggccgagaggggccgggacaccttgcagtccctacgccctgcacggctccccaaccagggtcctggaatgtaccagatgaggaccccaggcccaggcccacctcaccttggcacgtagctccttgagggctgggaagatgactcggagggccaggacagggaaggtgtttatggacacactcagcaggaccaccagcaggatggagggagaggacatcacgctgaggtcggcatctggggacagggcggggtcacagcagagcctacccccagctccaaggatgcccccaggctagggagcgccttggtgcctttgtgcctggtccataaaggagcgccttccccaggacactttgccggacgactgtcatgagcaacctgcaacctcttccatcggggctcccctgcaccacgaccgcccgtcccacttccccatgggggctcacacagaaacgggaaggtcgtgggggatactctgaagagccagaagctctgggtggtggtagtcatgatggcgtagaaaccaaggctgaggaggatggtcgccacgcacagggcggtccagtacttgatgataagaatgacctggacaggcagcggtggggtaaatccggggcctagcggggcttgcaccaggacaccagcccctggggtccaggaagggcacctggcaatgcccccaaagcaggggtccccaggggaggaggcctccataggccatgtccaaggccccggggaggtgaggaccttgcccacctccatggtgatggacagcaggcaagacagggccaccacgaccgcaaaggactggtggtcgctgaagctggcgggtcccgccgtgtcgcggctgatccacagtgtcatgaagaagttgaccagagaggtggtcacaccatgggcgatggcttggacgaagacccagtagttgaagagctcgtccttctgccccaccacgtacagctccggcttctccaggctctgctctgcgctcacgtccttggggcaagcagaagctcttgggattgggtggggggcgggggacacccaacagagatcaggatctcctcgggcaggccagtagggtggccactctctgtgtgtggctctttgagtttaagtgagttaaaataaagtaaggccaggcacggtggcacacgcctgtaatctcagcactttaggaggtcaaggtgggaggatcgcttaaggccaggagtttgagaccagcctggacaacatagtgaaaccccccatctccaaaaaaaccttttaaaggagctgggtgtggtggtgcgcacctgtaatcccatctacttgggcggctgaggcaggaggatcatttgagcccaggagtggaggctgcagtgagctgtgatcgcaccactgcactccagcctgggtgagagaatgggacctcgtctacagaataaaataaaatgaaatggaaagagctctggaggttggtcacttggccacacgaacgcactaggtgatgctgggctgtgcgcatgagtctggctgaga[139 bp omitted]ctggccaacatggcgaaatcctgtctctactaaaaataaaaaaattagccgggcatggtggtgcacgcctgtaatcccagctactcaggaggctgaggca[135 bp omitted]gtaaaatccagtccctgggtcacaccagccgcaacacaagcgttcctcatgggcacgtatggctgctggcttctgtgttggattgcatagctgtgggacacttccatcatctggaacgttccatgtgacccaccctcccaaccccagatcacgtagccagggcctcttggagctgggggatgataaacctagcagagtcatctgctctgatcctctctccccattgcatggatgggtagacagaggcacgggggctccagcacagggtgggggctcccacacacaggaggagctggatggccccgggatgagcgtaggctccggtgggagaaggtcaatggcagtgggcagggagaggtactggactgcaccccctgagccccaccccatggcctgaaggtctcccaggctccctctccccgccccaaggagcggaggagaggaggagaggctaagcagagacctggaaggaagacccggccttgccctgctcacctgctcaaagagcccaatgtagagaactggcagggtgctgtacaggaggttgaaaagagccaggaaccatccttcatacaggggctgagccgggggagaagggcaaggagaacaagtcagcctccaggcacccaaggagcctgccaagcaggcacccagggagggttctgggtgaggtaactctggtcgagttacactcaaggttggggctgggactggggtggggtgaagtgcggcctgataaaggcggcaagataaagggagggaggaaagcatgatcaaattccctcataatggcacctctgagtttttgttttaattggatggcatcaaaaaaggatacaggctgggcacggtggctcacgcctataatctcagcactttggaaggccgaggcgggcagatcacttgaggtcaggagtttgatactagcctggccaacacggtgaaaccccgtctctactaaaaatataaaaagtagctgggcgtggtagcaggcgcctgtaatcccagctacttgggaggctgagacaggagaatcgcttgaacccaggagacggaggttgcagtgagccgagatcacactattgcactccagcctgggcaacaagtgtgaaactctgtctaaaaaaaaaaaaaaaaaaaaaaaaaaaaaaaaacgctgggtgcgattgctcatgcctgtaatcccagcactttgggaggctgagatgggcagatcacgaggtcaggagttcgagaccagcctggccaacatggcaaaaccctgtctctactaaaaatataaaaattagccaggcatggtggcaggtgtctgtaatctcagccactagaggggctgaggcaggaggatcacttgaacccgggaggcagaggttgcagtgagccaagatcatgccactgcacgacagcctgggcaacagagtgagactctgtctcaaaaggtaataataataaaaataaaacagaaaccaatatatacttactaaggggtttctgtaaagctccctctcaaatgcccaggtattagtgatgggagctcattccttctccaaggcacctgcttcccagcagtttccctacacgcagggaatagcactgccctggggctcctctagtccttgtcaggataccgctcagagtctggaccagagccccagctcccacaatcggatcttctctggggttcaaggtcttgttcactcaactctccccagaagaggaggtccatgtgcagtgcctgcccttgcttgaaagctctgagtgtgccgggcacggtggctcacgctgtaatcccagcactttgggaggccaaagtgagcaggtcacctgaggtcaggagttcgagaccagcctggccaacatggtgaaaccctgtctctgctaaaaatacaaaaattagccaggcgtgatggtacacgcctgtaatcccagctacttgggaggtggaggcaagagaatcacttgaacccgggaggcggaggctgcagtgagccgagatcgtgccattgcactccagcctgggtgacagagtgagactctgtctcaaaacaaaacaaaacgaaacaaatatcctggaaggtgttgggcacagagctagacagggaccgtcacctcccttcacctggactctaggcctccactaacgcagccttgccatgtggcctcaggcaagccctgtccaccgaggatcccagggttctcagtgcgtccagggctgctcctggcagctatgggaggggcagggcatccccagaggccctggtcatggggcagccagggtgggggacgcacctggccggtgaagccgttgtagcaggcaaaccagacctgcaccatcatgctggccatgctcttgtagaagaagtagcgcaggaacttgcagatccgcacgtaggaccagcggccgtgcaccagcaggaggcgctgcaggaagcagaactggccgagcacgaagtcgctgttctgaactgcctgcatgccctcctggcccgccagccccacgcccacgtccgcggctgcagggcacaagcagctggtcagccccccgcacgcccccagtcccgcccgcccccccagacccccgcactgttctgccccctatcagccccccccatctgcttcaggtccccccagtcccaccgccgcctccatcagcgcccccctcacctgccccaggtccccccagtcccaccaccgcctccgtcagccgccccccactcgtcccaggcacccccagccccgccgccgccacccactcttgatcatgttgatgtcgttggcaccgtccccgatggccagggtcaccacctggtggtacttcttgaccagggccacgatcagggccttctgcttgggcgtcacgcggcagcagatgaccgcctggcacttggacgccaggtccacgaaggcgcgctcctgcagcacctcggagctacggcgggctctggagtcctgggctggcggtgcagccagcgggagcccgaacctccggcacagcagggacaggcgcctggcgtagaggaaatccctcctggactggccgagctcctgccacgcctcgtccatgttcacgttctgcgccagggcgcgcggctccttccgcagggacaccagcagtttgtcctggccggcggggagggggctgtgccaggcgccgtggcctccaggccagactggaccctacccggccctcggcctcgccagcagtccccaccccgagcccgccgcccctccaggcccctccctggcgccgggaccccgccgtccaccctgagcgacactgaccaggaagtctccgttaatgaccaaggccagcttgacctgcgacagggactccctggttagaaggttgttactgttttcccagtaggtctccaggatgcggctgcggggcgcaggggtcagcggggcaggggagggggcgggcttctccccacttccccgggggctccactgcccctcccaccccttccactgcccactcccccacccctgccccttctcctccccacttccctcttcccctcccctttcctcctcctcccgccgctgcccctccccttcccctccactgcccactcccccacccctgcccctcccccttccctctctcctcccctctgcctcctctctcctcccctccccctccaccgcccactcccctccgctgctcccccctcccctccctctcccctccccctccctccactgcccctcccctcctccccactgcccccatccttcccctccactgcccactccctcacccctgcacctccccctcccctcccttccctctcccctcccctctcccctcccctcccttccctctcccctaccctctccctccactgcccacttcgccacccctgcccctccccctgccctcaccttccctccctcttccccctccctcctctgctcctccccctcctctgcctctccccttctccctccactgcccctcccccttccctccaagctccctccactccccattaccacactccttcctcctacccttccctcccctctcaatcccccccttcccactgtgccttgggctccccgtccagtgagacacgcacctgggtgctccttgtcctcacctccccactccccttgctcaccccccaactccccacttcttacctaatctccttctcctccagaatgagcatattctctgacagcagctcgcaggcgaagccgatgttcacagccgtttctgcgaagcagaccagctcagcgcctctgcgacccgccccgcactggctgcctgggggccacgcccactctgcccggtgaatcctggcccgaccaatggcagccacatgccccaccccctggccatggtgattggttcagagaagggcttgtaacccaggctcaccaatgagagccagccctgagattttggctgtagttctggccgggactgggctgcccagagatgtgtctgaggccaggatcagcaggcacatgtgcctaggatccacagtgccttcaggaacccacaaaatgtctcaatatctttttaaatcagaagggaaataattgaatatgtttccctgggctggctcctggccgacagagggcaccctgaaaatcactttttttttttttgacaagggctcactctgtcacccaggctggagggcagtggcgcaatcacggctcactgcagcctcaacctcctgggcataagcgagcctcctgcctcgtttctctggag[154 bp omitted]tctcctgcctcagcctcctgagtagctgggattacagatgcgcaccaccacacctggccaggcccatttttgtatttttagcagagacggggtttgaccatgttggccctgctggtctcgaacttctgacctcaagtgatccgcccgcctcggcctcccaaagtgctgggatgacaggtgtgagccttcaaacttcagggaagtttgaagacccatgctgcaggggcttagccacccggagctgcccgggactcaccctgcttgtccccggtgagcacccatattttgatgttgctcttcttgagacatttgatggtttcagggacaccgtcctggagtctgtcctcgatggctgtggctcccagcagctggtgggggaggagggcagggcggggaagatgctgagcagccgtccagctccctggcgggggcaggagagtcccagggcccccttgggtgcccccgctgcccacccaccctgaggtcctgctccatctcgttgtacacctgttgcagggcctgtgcccggttctgcagcaggaggctggcctcctggtggcgctgctgccagtcctcgtaaatgtcctcagccacctccctgtaggccaggcacagtgtccgcagggtctcctgggcaaaggcctgggggccgggcaggtggaagctgtcaccatgctgaagccgacatccgaggctcagccctccccaaccccctgccgggctccggagcctgggtcccccaaccaaaagcctgttgcctccccagccaacagcagccagaagggattcagaaaactggtctgaggccgggtacggtggctcacgcctgcaatcccagcactttgggaggctgaggcaggcggatcatttgaggccaggagtttgagaccaggttggccaacatggtgaaaccctgtctctacccaaaatacaaagattagccaggcatggtggtgggtgcctgtagtcccagctacttgagaggctgaggcaggagaattgcttgaacttgggaggcggaggttgcagcgagctgagatcacaccactgcactccagcctgggcgacaaagtgagactccatctcaaaaaaaaaaaaaaaaataga[132 bp omitted]gaaaccgcgtctccactcgaaacacataaaaaattagccaggtgtggtggcgcatgcctggaatcccagctactcaggaggctgaggtgggaggatccctcgaacctgggaggccgaggttgcagtgagctgagatcgccctatcgcactccagcctgagtatcagagcaagattctgtttcaaaaaaaaaaaaaaagaaaagaaaactgagctgcccctgctccccacctactctgtctcagacacctgctcccacccccagaccctcagctctcttttgcctccagaccttcttggaggactgtttccctgccaggaacaccttccctatgctttgcacagcaaattctttttttttttttttctcgggggtgggggatagggtctcactttgtcacccaggctggagtgcagtggcccaatcatagctcactgcagcctcgaactcctgggctcaagtgattctcctgtctctaccttccaaatagctgggatcataggcacatgccatcacacccggctaatttctttgtatatatatatattttttaaatagaggtggtttcaccatgttgcctgggctggtctcgaactccagagctcaagcaagctgcacacctgagcctcaaaacgctgagattacaggcagaagccaccacacctggcctgcatggcgaattctgactatcactcaagaccttctatgcagtccacccacccggtgccttccccagctggggctcccccagtcccaggcccctccctctgacccctcaactttggctctctgagccccttccttgggcccctcatttctcaagggccagacccagggttggggcctctaggggctgggaggaaactgggcaggcccagagagcaggcaccccaagggtggtcggggggtccccaaggaaggtgcccttacggcttcttaccccccgaccctgcccccagctttgtgctccaaggggtggccttaggtctcaaatttgtttatttatttatttttatttatttattttttg[131 bp omitted]ccaccacatctggctgattttgtagttttagtagagacagggtttcaccaggttggtcaggctggcctcgaactcctgacctcaaatgatctgcccgcctcccaaagcactgggattacaggcgtgagccatcgcgccagcctgtttattaagagacaggggtctcgccctgtcgcccaggctggagtgcagtggtgcgatcacagcttgctgtagcctccacctcctgcactcaagcgatcctcctgcctcaggctcccaaagtgctgggaccacaggcacgcgccaccatgtctgatttcccttttgttgttgatggggcacgggtccaagagcttgggcttgacacagcagaggagcttcacggacattggcagcctccgacaggccttgacccttcttccggcctcaatttacccatccattccctggggtggctgagctaagctgacctgctgagctcctgggctctaggtcattattgtgaccgcacttccagttcagagtgcccccacatcctggcagagcaggggacacaggacatcttcccacacacaccccgctgccctgtgctccatgctgctggggccccagcagaacctgtgaggagcccccaggctggacgcagaatcctctggccctgtagggtcagggctggaccagggggaggcagcctggggtgatgacagccccatgttggcagggggtggggcaggaaaggccccatgtgtggggagcttgtggctgagtcatgaggacaccgaaagcttctgaatgacaaaggtgcagggaagaccctcccagcacaggaaacagcatgtgcaaaggtgccaaggcagcacctgagagtggggaagtcacaagccagaaactgggtcctagggagtcccttggtgaggccaaagagagaccaggctggagaggtcagcaggggacagaaaaagcctcaaatcctgggccgaggagttcgggcttcccccacagagtgggaagctttggagcagacggagctgagtgtgtcctggcagctgggccagctcaaccgcacggtcgtcttgtgcaaatgagaaaaatacacccttggccgggcgcggtggcctacgcctgtaatcccagcactttgagagggcgaggcgggtggatcacctgaggtcacgagttggagaccagcctggcaacatggtgaaaccccatctctactaaaaatacaaaattggccgggcgtggtggcgggcgcctgtagtctcagctactcaggaggctgaggcaggaggatagcttaagcctgggaggcagaggttgcagtgactcaagattgcaccattgcactccagcctgggcaacagtgcaagactccctctcaaaaaagaaaaggcaggctgggcgcgatggctcatgtctgtaatcccagcactttgggaggccaagggggcagatcacctgaggtcaggagttcaagaccagcctggcccacatggcgaaaacccatctctactaaaaatattaaaattagctgggtgcactggcgtgtgcctgtaattccagctcctcgggaggctgaggcaggagaatcacttgaacccgggaggcggaggttgcagcgagccaagactgtgccactgcactccagcctgggcgacagagcaagactctgtctcaaagaaaagaaaagaaagacaagacaagaaaaagaaaaagacgctctctctctgggggctacacttgggagttcagctgcctcccagccggtgtgtgtgtgttttgtgtgttgccgggggagggtgttttgtacagtgcacaacatacctcactgtacatagccatcccaggtacctgcagccttccatttctccgtacagtctcctcccctgcctcctcctcctcctgtccctacacacacacacacacacacacacacacacacacacacacacacacacacacacacacacacataagccagccttcctgaagggactcacagccaaggcctcctctgtggcaaattccattgcccccctcctgtgcaagcgttcgaagatgaccgtgtcggcgcccttggtgtacaggcagatggcgccctctggctttcgaactgtgggggaacaggccctgctgcccacagaggctccccgtctgcccgccccaccttggggggcccagggcttgggtggcggggctcacccagcaccgacatccgtttgcgcgtgctgttgaagtccattatggccaggacctggtagacccgttcctcccccagctccatgatcgtgacggtgtcctgggtgcgggacaggaacacgtagccgaagttccgggctgcggtgaccagcgccccctcgtcgggggaggccgcctggtacaacagctggtctggtagggaggggggccattttggggtcacgtggtggagcccgtctccatctccacagtgcagggaggagatgggtatcgcctgggctacacctttattgatggtggccggggacccccgcctgtacaacccaatgcatggaggtgagcacttgagactagacgaccttcccgctcaacaacagatcctcgggctccgaccgcaggcctggacatcctttagccctgacgatgacacgtccgccctcccgccacgatgcttgtcagcactgtctgggctccaggcccggacgccctcgaggtgcggctggtgtcacaccggcctcagcgccccccaagccagctgaaagccctggaagatgggccgggtgagctgcggggctggggacactgccgtgccccgggggctgagcggcctcagagatggggaggtgggtgggcgcacctgggcgctcacgggggctctcccgcaccatcaccgtgtggcagatggccagcaggcgccagaactcccgcacggcctcgtccccgttggtccgcacgaggtgcagcagggccgcattgtggaagagcagcttcccgtcggcgaacttgttccagaggtaggggttctcctgggggtggcgggggcacgggccggctgtgggtgggccgctccccgtgccccgtccccctcaccgtcccgcgctgcaagccaggcaggctcaccttaggtcgggtcgtggcctctgaatccggccctggggaaagacacagcttcctgcttcagctcccacaggccccccattcgggatcccatagcccctgacccctagtttcaggcttccgggggccactggtgcagccacacaagccaggcctgtggccctggaaccgacaccccgagcaatcttggggcgaaagctgacctcagtttccaccacctgcagaaagcggggaagaggggagcacacccatcctgtctcccagggaccccaaaaggacagcctggagccggatgcggccccgtcccgtctcccagggaccccaaaaggacagcctggagcgggatgcgggctagggaccccaaaaggacagcctggagcgggatgtggccccttcctgtctcccagggaccccaaaaggacagcctggagcgggatgcagccccatccgtgggacacactttgtttcctcctcctggggtttttgttcttttttatttttatttatttatttatttatttatttatttatttatttatttatttttgagacagagtcctgctctgtcgcccagactggagtgcagtggcacaagctcagctcactgcaacctcagcctcctgggttcaagtgactctcctgtctcagcctcccgagtagctgggattacaagctcatgtcaccacgcctggctcatttttgtatttttagtagagatggggtttcaccatgttggccaggctggtctcaaactcctgacctccagtgatccgcccgcctcagcctcccaaagtgctgggattacaggcgtagccaccgcacccagccactttttatgctttattgttcttagaaatggggtcctactctgtggcccaggctgcagtgcagtggtgcgatcatagctcactgcagcctcaacctcccgggctcaagacatcttccctcttcagccttccaagttgctggggcaacaggtgcatgccacccctttgtggtgtcttttgtgtgtgtgtgtgatggagtctctctctatcacccaggctgctggagtgcagtggcgtgaccttggctcactgcaacctccacctccgggttcaagcagttctcctgcctcagcctcctgagtagctgggactacaggtgcctgccaccatgcctggctaatttttgtatttttagtagagacggggttttgtcatgttggccaggctgctctcgaactcctgacctcaggtgatccacccgcctcaacctcgggcccatttttctatagctgaacttgaaccatttcttggggacttctcactacactaaattatgacccagtccaaaccacgtgccctggttataaattagacccggggctgtcaaactacaccccaccacatcatcaatttttgtacggcctgcgagctaagaattgtttttggatttttaatgg[187 bp omitted]gtggcgggcgcctgtagtcccagctacttgggaggc[160 bp omitted]actcagcaattcgaatttcagcatccacaaataaaggcttgtgaaagtcaaaagaagagcagtggccgggtgtggtggctcacatctgtaattccagtgctttgaaaagcggaggcaggcggatcgcttaagcccaggagttcaagaccagcctgggcaacatagggattccctgtcttgacaaaaaatacaaaaataagctgggtaaggtggcactctcctgtagtcccggctacttgggaagctgaagtgggaggattgcttgagcccaggaattcgaggctgcaataagctatgattgcaccactgcattccagcctgggcggcagagcaagaccccatctcaaaaaataaataaatacacactgtttaaaagtttggctaggtgtggtggctcatgcctgcaatgccaatattttggaggctgaggcaggcagatcacctgaagtcaggagttcgagaccagcctgggaaacagggtgaaaccccatctctactgaaaaaaaaaatacaaaaattagccaggcggggtggcacgcaactgtaatcccagctacttgggaggctgaggcgggagaatcaacccaggaggcggaggtttcagtgagcagagatcgcaccactgcactccagcctgggcaacgag[143 bp omitted]gaaaccccatctctgctaaaaatacaaaaaaattaggtgtggtggcaggtgcctgtaatcccagctactcgggaggctgagccaggagaatcgcttgaacctgggaggtggagattgcagtgagccaagattgcaccactgcattcctgcctgggtagacagagtgagactctgcctcaaaaaaaaaaaaaaattttcctggccccctccaaaggaaaccaggccatctggctacggttccctggttcagattcgggcggaggtgctgggcatggggccagacgtggctctggttctcaggcaccctgagccccttgaagatcgaggacccagctgggagctcaggtgtcggggccgcaccatagacgcggccgctgatgcagcacttgttgaaggtcaagatgttctgcgtgagcgtgcccgtcttgtccgagaagatgtattccacctggcccaggtggtcgttgaggctggtgctgcgggccttggcaggcacgtcctgcggcttgtagtacatctgcacgtcccagtcgatgaagacgctgttccccaggtagatgaactcggacctgcagaggcactcagggtcacggtcagccccgcctgctgtgtgccatccccatgcctccccgttccgcgtttgcaccggggacgcagccggcggagactcacaggatgaacatggacatcgggatggtgacgctgagcaggatgaggaagctccagaagacgaagaaggactctgcggccacgctgctcccatgcacccccgagaggtagtagtggtggtctttgaattctttgactgagaaaccgaagccgaaggccaacaccaggcagacaagcaccacggagatgaagatctggaaggcagacgcgacagggtgggtgaggggggcgggggtcccccactctgccatcaggatggggtaaacacaaagataaggctggggctgggcacagtggctcatgcctgtaatctcagcacttcaggaggctaaggcaggcggatggcttgacgtcaggagttcaagaccagcctgggcgacaaagtgagacctcatctcgacgaaaaacttaaaaaataaattagtcaggcatggtggcgcacacctgtagtctcagctgctcagaaggctgaggccgaggatcgcttgagcccaggaggctgcagtgagatatcatggcgccactg[133 bp omitted]gcctcccgggttcacaccattctcctgcctc[133 bp omitted]cagcctcccaaggtgctgggattacaggtgtgagccactgcacccagccgaaaaacatttatttatttttatttttatttatttatttattgagacagagtcttgctcagttgtccaggctggagtgcagtggtgcaatctcagctcactgcaacctccacctctggggttcaagcgattctcctgcctcagcctcccaagtagctgggattacaggtgtgagccaccacgcccagctaattttcgattttctgtagagacggggtttcaccatgttgttcaggctggtctcaaactcccaacctcaggtgattcacccacctcggccccagaacgtgctgggattacaggcatgagccatctcacccagcctaaaaatatatttattctggccaggcacggtggctcatgcctgtaatcctagcactttgggaggctgaggagggcggattgcttgagctcaggagttcgagaccagcctgggcaacatggtaaaactccgtctctactaaaatacaaaaaaattagccaggcgtggcggcgtgcacctatagtcccagctactcgaggggctgaggcaggagacttgcttgaacccgggaggcagaggttgcagtgagccaagatcacgccactgcactccggcctggtgacagagtgagactccatctctaaaaaataaataaatacataattattattattttataaaactttttaaaaaattactttaatgaaaaattttctggcccaaagacctgcccacaggatcaggccgcacattttgcagaagaaggaaactgaggcctggaagatgacatccctgaccctgcactcctctgtgttcctggggcaggggcacttgttggcagctcaccacaaccaccagcttgttcatcaggaggtccagcttggttctcttcaaatggatcttgccacagttcttcataatttttgtgtcaaaacctacaaacatgtatccatctatccacccacccacccacccatccacccctcacccacccatcactcacccatccacccactcccccactcatccacccacctacccatccacccctcacccacccatcactcacccatccacccctcacccacccatcactcacccacccacccttccacccctacccacccatcactcacccatccacccaccccccactcatccacccacccacccacccatccccacatccaggcacccacccacccacccatccccacatccatccacccacccatctgcccatctatttgtctatccatccatgcactcatcctctcacacatccatccacccacctacccacccacccatccccacatccatctaccacgctcccatcagtacagctcccactccaggaccctggagcagccgtaccagcataaatgaccagtccatagcaggtgtctgtgttgcgaatcctgcagcctcggaggaggaggttgccaatgtccagggagtatttcttgtcattccattccaggcaccccacgaagtggtgcatccgactgttaggcgcctcacacgtcactgtgcctgtgggtggccaggtggtcagtgggtcagtgggctcaggccctcctccccaggttccctgcaccgggtgcaggtgagaacattccggccaccctcacgagcccctctgtgccccaaacttgccctatggtgccccagcactgggctgcctccaaagccttcctgtccccacctggcctcagggactttgggcaggctgttccttccacggggactcacacttccctgatcctccagccagatcagcccctcctagctcctagctccctccctcgtggttctgatcccagcatgtgacgagacatttatctgtgcaaagctattgttaatgtctgtgaactccatgagaactggtgccagcctcatctcggccacactctgaccccagggcacggaccagcacctgcatgcagtaggtgctcaataaatgtgtcaagagggaagaggagaagggacgcctgatcgatgagcctccttttgggtgccggagcctgtctaccaccaccaccagccccccattcaccaacaccctgcaatggcctcacttcattggagaactgcacagactggcccggggcagcattcagtgagggttaaaatgacaatggggcatgggttgggaccccagaagagagaggggccacagggttcctgaagggtcctcacctgcctccccatcgcgtcttagggatggggaccctgactccatcctggatgcaggaattggagacgctcatggtgggacggccagagggcagagaaccacagggcaagcccacacctcaggccacctctctgaacctcagtgtcttcctctgaaaaatgggtctatgcccagtgagaatgctggggcagatggacgaggccagggcccacaaaagcctccttgctcagcccgggaggaaatgctagaggaagagccgctgcctgtctatgagtctgtgtcccagtggtgttaaagaaggaagccggccgggtgcggtggctatgcctgccatcccagcaatttcagaggccgaggcgggtggatcacctgaggtcaggagttcgagaccagcctcaccaacatggtgaaaccccgtctctactgaaaatacaaaattagctgggcgtggtggcgggcgcctgggatcccagctgctcgggaggctgaggcaggagaatcgcttgaacccgggaggcg[141 bp omitted]tgtggccccctccaccagggctaagcctttccccagatatcacagacagatggggaaaacctctttgggtgtcaggagcaaggaaaagattctgtcctcaaaccaattagagtgactctccttcacaataagataagaaaaccaaacaaaactgtacccccagactgggctgcagcaaagagtaactgtttccacatcacgtgtgaaacatctccaggtggaaaataagaaaccgtcaagcaggccgggtgtggtggctcacacctgtcaccccagaactttgtgaggccaaggtgggtggatcacctgaggtgaggagttcgagaccagcctgaccaatatgatgaaaccccgtctcggccgggtgcggtggctcatgcctgtaatcccaacactttgggaagccgaggcaggtggatcacaaggtcaggagatcgagaccatcctggctaacacggtgaaaccctgtatctactaaaaatacaaaaaattagccagcctggtggcgggcgcctgtagtcccagctactcggaaggctgaggcaggagaatggcgtgaacccaggaggcggagcttgcagtgagccgagattgcgccactgcactccagcctgggcaacagagcgagactccgtctcaaaaaaaaaaaagaaaaaagaaaccccgtctctattaaaaatacaaaaattagctgggagtggtggcacgcacctgtaatcccagctactcaggaggctgaggcaggagaaacgcttgaacctgggaggcagaggttgcagtgagccaagatcgcaccactgcactccagcctgggagacaagagcgaaactccgtctcaaaaaaagaaaaagaaaaagaaacagccaagcattggaggtgtcagcactctgttctcagaggccttcccaccacaggaattgccagcccatgcacgcaggtgccttttcaatgaaacaaccaaacgtgactgtgttatggttaaattttacacttaatagaatgtagcactttatttttggttttgacacaggggtctcactctgttgcccaggctgagtgcagtgatgtgatcacagctcactgcagcctcagcctccctgagctcaagcgagcctcccacctcagcctcccaagtagctgggaccaccggcatgtgccaccacgcccagctacttgttttatttttgtagagatggggtctcgttatgttgtccaggctggtcttgaattcctgggctgaagtgattctcctgcctcagcctcccaaagtgctgggattccaggtgtgagccactgggcctggccagcaccttgttttaaaaacagtaataacaacaacaaaataccctaacttttaacttttacagattcgagggacgtgactccctgctcaacgcctctcaccttgaaaggacgccatcttctttatagtggccagttctttgtgggtgaccatcagggcctgtctgaacttcaagttggtctccctggtgacgaggagaggagggaggtgaaagtggagttgatggatgcttcgaggagcccccagaccccttctggagtcactcaaacattttcactgagcacctactagttcgccagctgccagtcagatggctgaggcccagagagggagaaggccttgcccaaggccacacagcacatttgcaaagtgctgaggccagggcctagggcctagggcctcctgcccgtatgcacacaatggaaacaatggggagggtgggcgtcttcctcccctcagtgcctggcagcacccacgccccagacactcatggggtgagtgaccaaagtctctgagcgaccttggctggccgcctccttggtgactggggaagggggctcctccgggccatgctccccaccccccagggtccccagcgatgccacagctcctcacccgtcaatgtccaccgtctccacatagcacaggctgctgggctccgtgctggccagcaagagcatgtcggcctggtgtggagtggggggcagcgttgcaagaggggatgcaagacaaattgggggtgcggcagccctccccaccctgggaggggtgctctcggtgagggggcgcgtggttctgggacctcggggtcaaccccagctcactgggacgatgttgtccttgcggagacagaccacatcccccacgcacagatcctgccatttcttctgcttgaagctgcggggagagggggttgtgaaggaggcccctccctctgccaaccctccccacaccgggagaccagaggcacgggatgacggggggcccgcagctgcagtccccacctccgggcctttgccccctcaggaagccttccccgggctcccaccccactccccgcgggtccacgctcccacccagtgacctccagggtcctgcacccacgtcctcttcagactttccttgtcctccccatcgcccgagccctaagctctgcaagggttcgccatcagggcctcggcctctgtcctcgtcccggccaaacgcctaatgaatgcaggcccggttcctgtcggactcaaccagccgggagatcagggagcacggaaggtgatggacacttgccgaggccgatgaccctgctgggctggagcccccgtgtccccgcggatccccagctgcagccccagcctcacctcttccccatcagaatctggcagggtctgttgttgatggctctgtcactcttgtgtctcccctgggccaggagggaaaggatcagagagaccgtccagcctctcctgcccccgcccaggccgctgccgcactgcagcccagcagtgcccgcccgcaacacggggtccctgtccgctggccccacgccacgttgcgtctgctcagggatcccggacgtgggggccactggacccactgctattggcggggagaagacaggcgtgctgcccaccacctagagtgcctgccagaccaccccccaccaaagctcaatggccccaaaaccacgcaccgacagagccaacgccacctgcggcacctgcccaatgtgggtgctagcagataaggacaatgtagccccagcagctgaggctcccaggcccacgttcccctaatgctccaggaagcccagccctcctcccactctcgcccagggatcaagagacccccccgaccggccccgctccctcccccaggcagctgcatccaacagcactcaccatgtcgtccaccaggtcccgggtggcacggatgaagaggaggcagaccataggggtactgagcgagaaccagggcagcgtggagatgtcgggaatgctctgacgtgagggggccacaggaagggtcacaccagcccactcccccgtcccctgcccttccaccaagccgacctagccccgcactcgacaccacgtgacacatctgctggccaccttgaccggggtccagccatctcctgcaacccccagccctcgggacaaacgccccggcatccctccacctgcctggaacttctcccacacgcctcgtctccccagcaaactccccttctcccgtccaagcccagctcccacggtgccttctccagggagcctcccccagccccaagcttggccgccactgctccccctccctcccatgtccctgcttccccaggtcaccctgcaggtgtgagctccaccatcccctaccctggcacccggccagcggcctgcacacagtaggtactccattaatgctgaatgactcgatggatgaaaggagaacctctccatccagaacagaaatgagatgttgggtgagagtgtttgctctgaaaacagcgcccctggccggatgccggccccacgctggcctggaccacccaggtaccgggaagtggctccacaggtcctgagaacatgctctgggctcctccttccccctcgcctctgaggtcagctgggagggcgggggccaggggagctgcgtggccgaggccgtttaggctggggaacagctatgcctcccgatgcccagccctgcccagcaggaaccagcggggcgtggagagggtgccgtcatcagacctggagggtgcatccatccacctttgtcattcaacatgtactgagcgcctcttgtgtgccaggccctgggcagggtagtagggactcagcgctgagggtcccagtctgtggggagtgggacgtgaacccacccatcacacagacaaacacatcgatgctgccaggtggctaggggggacttcctggaggaggcaacacgcctcacctgcaggatgatgatgatgaggaagaacaggttggacacgcggtggaactgctcgtacaggttcagcggcaggaacgagtagaagttgtacttggccgtgcggatgacattggtctggaacgagagccgcgggctgcctggcagaggggtgccatccaggccaggggatgggggtgcccgaggccagacctgcctcacttggcctcgcccagcatcctctgggctatgggacacacaccattcattaagcatctactgagccagcagttactgagcacctgctgaatgcaaggcctcagaccagcatttactgagcacctgctgaatgcaaggcctcaggccagcatttactgagcacctgctgaatgcaaggcctcagaccagcatttactgagcacctgctcagtaatgtaaaagcctggagccagcattaatcaagcttctactgagtgcaaagactcatggagctgtgaccagcatttcccaaagcaagacacccaagaggatttcaggtagggccgcgatggacacattgtactttcaggttgggtattaactgaccctcacgtgcactgggacagggcaaatgagacacacagaactcttgtgccaaaccagtgatttggttaggacgggcggttcggtcctcgagatgaaaataaaaatatcggccagacatggtggctcacccctgtaatcccagcatttcgggaggtcaaggtgggtggatcacttgaggtcaggagttccagaccagcctggccaacatgacaaaaccccatctctactaaagatgcaaaaaattagccgggcgtggttgtgggtgcctgtaatcccagctacttgggagtctcaggcaggagaatcactagaacccgggaggcagaggttgcagtgagccgagatctcgccactgcattccagcctgggcgacagagcgagactcc[134 bp omitted]tgaaactgtctctactaaaaatacaaaaattagtcaggcgtggtggtgcatgcctgtaatcccagctacttgggaggctgaggcaggagaattgcttgaaccccggaggtggaggttgcagtgagccgagatgtcgccactgcactccagcctgggcaacagagggagactctgtctcaaaaaaaaaaaagaaagaaagaaaaagaaaacgaaaaccaaaaaaagaaaactatcgagcaaatacaagcagaggcaggactcaggaggagcaaaaaatagattccccgagggtaccacggcagctcctctggagcagggaggcgcgggaggggccgcccaccttgtatttcttcctttgccagcacaggatcaccttctccttgaactgcccgttgtaggcacggttgttggcctggaccttccaggtgaatgctgcagcgagagagccgggcgtcgctggagctcgaggcccaggacaaacacccctaatgaccgcccggaggagggctcatggggcccgtgggacccaggcactggggaggcccgagatgtcagagcccgtaaacagacagtcgggcagcaggcaccacctggggacctaccagaccctgcccatagttggcgccggcacaagtggattccgagagtggccacccacacccccagccaggggcctgtcctgagacgcagagaacaggccctgggagaccgttcaggcctgtacattttacagaggggggtaaactgaggcttggtgatgggctcttgggtgtccaaggccatacatccagctggcggcccagatctttctgggcatgcagcccccaaatcctgagccaaatcccccaaacccagtcagtactagggttggagactactagaaaccaaatgagaatcctaggcaaggcctgacgtgcaggtctgggggccccagcccgtctcagcctcagccctgcacttttttcttttttttgagatggagtctcgctctgtcacccaggctggagtgcagtagcacaatcgcagctcactgcaacctccacctcctgggtctcctgggttcaagtgattctcctgtctcagcctcccaagtagctagaattacaggcatacgccaccacgcccagctaatcttcgtacttttagtagaaacggggtttctccatgttgcccaggctctcgaacccctgacctcaagtgatccacccgcctcagcctcccaaagtgccgggattacaggggagagccaccacgcctggccagccctgaacttcataatccctcccacctgcaccgccccctctgcccaggatcagcacctgagttcctgtcctcatcttggagatcttctctctggccgaggctgcccatgctggtggggctgtgggagagaagggccccgggtcacagcagtgaccccagcccttgctgggcaccactcggtcttcaaggagctcacagcctaggggccgaccctctcaaatgctacctcccacactcatctgcagcctccccgccaggctctgaatgtccagccataggctgtgtgtcttgccttggacatcctgagacctaggggaccccaagatgatcctcaaacctgcaacagcccatctgccagtgtcccccgccagccaccctggtcgcctcccgccagtacagcctagaaggactctaccgccagccatgccagcctctggccatgccagcctccggccactgctccccacacctcgcttttcctgaaaggaccactctcacctcctcctggtttcactgacggcctcctgcccctctccccatgtggcaccagcttaggggctcagtcatctgttcactgactgaatgggacccccgggctatatgttatatctcaaaacacagcatgagggtcaggcatggccactcccctcctcacccccccaggctgggcagcaaactctgatgggggcgatggaggcagacggacatcgtcagaagatcctggaatcttctccactagcaggttcaggaatgtgggtctggctctagccctgcaccgggggccctggtttggccccctatgaggatgggcaaaccacccctagacgccagcaactggccccccacctgccagctctctagcagtgccctccccgccaagcccctgcccctgtgttccggccacccgatgcacccgtcctcacccttctggtctccattcatacttcctagcccggccaggctgggccttgtgcctcctctcaggtgcccctctgcctggggagtctcccatcccagctctgatcaccgtctcacctccgcggatgccagcaggacctgagccttcctgagtcacgtctgagtcacccgtgtccccaggtcctggtggggcagggcttggctcagggccagctctggtgctcctgggagtctgagcggggccagtgcccattcaccgcatgaggaaaagggaggttcagggcgaagaggggtttaggctgtgggacgggggagaggtgggggagacccccgtgggggcagactggggattggagagttggagagaatgctcaaatggccagaatccactcgaagtgtatctgggggcagaaagagacacggacacagcgctggcttcctgccccctcactaactgggatgccccattactcggaagccccccaccccgtcttcccgcagccgcaggggcacaggaccgccctggacagggctccagagtccagggctgtctgcacccgccccggggccccgaccgcgcgaacctctaggggcgcgctctccacccccgccgccacgaccccagctctcagcctgggtggagcccagagagggtgcgcgggctcccggggacgcacagcagtgggagcacccgccgctcaccggcgcaggagaggcaggggggggcaggccgcgggcgtccagggcggcggacgtggtggaaccgttagcccggtgccaacggtcctgaaacggggggcgggatctcggggcggggcctcggggcccggccaaggcgaaggtggagccagttcggaccccggaagggggccgggggcggggcctggagggggtgggtggggccaaggcgaagaaggggcggggcctcgagggtggggccgagcggagcacggccgagcaggatgggggccaggcctcagggacgcggtcacggccgaagggcggggcctcgcagagcctcgcagaacaggccgggatagaagacgctcgggagcagtgcctgggtctggggaggggccgggactttggggaagggactagaaggaaggcgaggacgagcggggtctcgctgagcaaagtcagagtaggggcggggccaggactcaggggcttggccagagcgggaagcggggttgagcatggccttgcggagcagtgttatggtaggggcggggctgggatccggagccgttacaaaggaggaaggcggggccgcgcagagcagggtcagggtaggagggcgctcagggtgggtccaggacagaaggcagggccttgggagggccttagggagcagtgccagtgcaggggcggagcctgaaagggaagagggtgtcagggcagggccgggccgggcttggtcagggagcagaaagaacctgcaccgcagggcggggttggaagggttcttggaaaggtgggcctgggtcaggtcggaatgggccttgcagacctgacggggctgaggctggtgcggccagcgtggcagagtgcaggaggaaggaccacaggtaacggcggttatgtaagtcatgtctgatccgtgtcctgggttcgttcattcatcccatacacgttcaacgagcgcctcctaggcgcagatgcagggctgagcaccaggctggggagaggcggttatagccattgagaccaccctaaggccaagaggaagcccgcagggttctttccagcaggtggcaggggctcagggatccttactgaagaagtggcaggggtgagttcagcgacgaggctagggcgggtccaggccagcgatagggcctggagccagggtcagaaagtgtgtgcggaggggctgctgaagatgaaatgcccccaagagtgaggctacctggggtgagggcccaaagggagaggcaaacatgggtggagggggatagggaagccacctcccccatcaaagcggcaaccacctgagggctctcggtgatcacaaaccctctttctttggaagcccaaattggaagcctgcttggccctggaggctgccagggaacctctctttttttggagacagagtctcactgtgtcacccgggctggagtgcagtggtgcgatcagagctcactgcagcctccacctcctgggctcaagcgatcctcctgcctcagcctccagagtagctgggaccacaagcaggcaggcaggccactgtgtttgacttctctcctttcattccttcaacacttcccctgtgcttgcttgcttgctcagtggttacgaaaaaaagccggggctgggagtttgaacacactgttctaataaactttagaagagacctggttgggtgcagctgtgaggaccagattcccccaccccagccttcgcagggggcactatctgggggcaggagcttgcccagggcacttgtgcaaaggccctgaagcctccagtggcaacaggtggcttcacaagctgaagggagtccctgggggctgaagccagggctggccagccttgggaccccccgtgggctatgtcctgaggcaccaggtgcgttctgggaagggggaggcagacatcacatgggaatgcacagaaacagagcgcatacacgcctgcgccatttatttagaacacagagccgggcacagtggctcatgcctgtaatcccaacgctttgggaggccgaggcaggtggatcacttgaggtcaggagttcgagaccagcttggccaacgtggtgaaaccccatctctactaaaaatacgaaattagccaggtgtgatggcacagccataatcccagctactcggcagacagaggttgcagccagctgagactgggtgacaaagcgagactgtgtctcaaaaataaagaagaaaaagaaaacaactcctttacagaagaggtgggagagtcactagtcacaagaacagccctcgagggtggaagggcctggcctaaccacggtcccccaggagggccctggagagatgcagagcccagaaccgggaagggagccttgggatggagtcctctggggagggcccccacgtcctcatcccgggacctgtgcccttggccttgcccttcagcagaagcccaagaccagggtggcaggaaacccactccaggcaacctgcccccagctgctgggtcctgtcccgcaaggctcatcactttttctacttgaggtcaataaaaagtggggcctaaacacccctgggcctcccatttccaaatggggtcccgatgcaaccacagttgcccgagacgtgcgtgcactacacaatgtgtggcgtttcctggcaagggccggagcagctttccgtgtctgcactccatcctttgacgggcaacacacagcagctcccagtctctttaaccccctctcaccatctgtgtgcagtccctatctctgggcagggcagagagggaagccagctctgtgcacagggcccagctccacacagggctggggacaccacccactgtccgagaggcactagaagctgcaggatggtggcccatgatctggggctggaactgggaccccacagcaggtgtggcccagccctgggggagccagccctgggccagcttttgtgagggaaagtttcactgctctgttttctctgcgttgatgggaagagaatcagtcccggctgcagggacagtggcctccccggggcacatgcagaggcctcaccaggcaccaagaccaagaccaccacaaaatctaaaatccatacaaacatttattctgtccctgcctggaggtgagggggaagggggtccggagagccccgcagaggaggacggggctctagcgggaagacagtgtccggaggccggtgggctccctctagacggcagaccctggggctaacgaggggccagctgggttctcagaggtcacggagtgcaggggtggggcggcgagtggtggaagccggcgcccccgaagaccggccagcccctggagcacagaggcgggtccagcccacactgcgctgagtgtggccctggcccccactggggtctgtcccacccccaccccgcaggagggaaggcagcaggcccgctcttcccggtgggaaagatgctgtgcaagtcatcaggtttaaattaaaaataataaaaataacaatacaaaataaaaaaagactgtctcaaacaaacctgggacaagcccgccccgcgacccacgtgaggagcagaggtgccggccaccacccgggagggagggcctggcaggaggggcaggaggggctgcgggccgggtgggggcgggctctgtcctggtctccatcagcagcagtttctagagacgccagagggctggggggcagagggtggggaccggcggaggggtgcggcaggacgtgagcgggggtgggctgggctgggcgttctctggccgccagctcatcccgctgctctgggctgcctcggccaggtggacgggttaccggagatttattgcactgttttggaagaggcatggggctaaggaccagcgggacggcaggagaggcgggtgggaggcgggcaggcgtcatcgcttggtcttggcgtcttctcgaaccttccagatcaccaggtgcatgcaggcgccggcgtcctcgctggagctgtgcccatccactgcggggcagatgcggtgagcacccggcccctgcgcagggacggccccagggcaggcaccggcactcaccattgtcctggatgatctgtctgaggtagtcggccatgaggttccgcagggaccgcttgtaggggaggcccaggcggtgggggaagagcacagacgtgtccaccacggtgctgtggatgacctgtgggcagcggcagagatcagcgcacgtggggcctgcgcaggtcctgctggagaaccgcgcgggacccgggccggcagggcaccttcagggccaggaggtcgctctccaggctgtgtccgatgaggatggtgtcagcgctgaacatgctcagcagaacggcctggacgtcacgcagcgtgacacttgtgtcggcaaggtcagcctccgtcacccccgaaaacctgggggaacgggcaggaggggcaccagggctcagcctggaagcactggctggtggggcgggggagggtgggtccctggggagaggcggctgggagggctcccagctcgtggagggcactggccacacctggtgttgtagtccacgatctcgttgtcaggcttcacgaaggtgtcataaaccacgtgcacgtccgtgtcgaccaccgtgacgcgcgtcagctccaggccatatgtggtgtaggactgcgggcaagggatgcacctcagatgtgtcccaggcaccggcctccctccctccccttccctgcccctttgagtctccagagcccctccaggcagaggcagtgaccagagactctgtgggacttctaggagaggccgagtggggtgtgacctcagtaaccccctttcgcaaagccctcctgcctcccattcagaggcagagccggggcccagtgcccggtgtgcttggctctgctgggaagtatggggtgttggtccagggcaggagccacaggcaccggtgctgcgagagaaaccctgagcgctggccggtgagccaggcccagatggggccagatggggcggccgcaccaggccaggtcctccccaatcctgaacccgacgctgggcagagaacagcctcaccatctcgcagtccagggcgtagatccccgggtgggtgtctcctgagagctctttctcaaaggtcttcacgaagccctcaaggcgctccttccggccatcctgcacgtgttgctgggggtggagaaggcaggtgagggcagcttcggggtgcagtgggggcgggggtggcagcagcagcacatctctgagcccttcgggaccatcctatccatccatcacgcccattcactggttgggaccctggtgagcaggtggggaagggggcttgccaagaagacacagggaggacggcttcccaggatgggaagtggccagggacagggcctggggcctacgggtgctacgttctctgggtaacacaagaaaggctgcccgggggcccagaccctgagcccaggactgtgctgtgtcccgagaccccacaccaacgatggggaggcagaagtctgttgagaacaggcagaggggactgggacgccagggctcacctttgcgacttggcagccgacagagccggcggcagccgagcagcacatgtactgggtctcccagcctccggccactgcaggggacacagacacacagtcagggcccggccaggcccactccacagcccccggggcactgaccacctgcatctaccgagccctactagggagtgaggactgaggacaggaggcctcagcctcttggtggagctggaagcagaccaggccccggcagtcgtgtggcagccaggacgcccaggcctggatccagggagaccagtgccctctgcagaggcctcttggcagcgctgccccgggcagcaccctccaggtatccctgaggcgatggctttaggggccgccacagggctgtgcaaggctggccatgtgccctgagcgtggctgcgtggttgcctgggggattgaatagaaccaccaggccaagggtgggacaagcccctccgctcctggggccagcaacctccacatttccatggaccaagggcacaggaaggcagggacacagggcctttcaggtggtggcatttgaaccttgtcatgggaaagctcttgtcttacttttgcataaagaacaggtggagagaaaatgaggccaagggctagccccggctctgccaaagacggtgcagcccagggaccctgagtgggatggagggcctgggtaaagccttaccccagttctgggggcctcaagggagggcccaggttccgggggccatgggtgggaaggggaaggacccgggtaaggccttaccccggttccggcgcagccgtccccagtggtaataacactcctcgtcccggatgcagcggcctgaagaggacacgaggtactcggtgccacagcggcagcaggtcctgcaggaagctgtgggtggggacccaggtggaagctgaggctcacgctggggcccgcatgcccggccttgcccacatcccgcacctgcccacctaggccgtcgcaggccagcgactcacagtccttgggcctcttctcctcagctgtgaagatgattgcgcccccgggccgctctgggtgcgggaaggggtagccgttctccttgagctggtcctgggtgagcaggtactccctgaggcggctgtacagggcagcccctgtggacaggcacagtggtcagcccctgcctgggatggcccacggggcggtagacaccaccgggaaaggcggctgggccggcaggggcccacgaagcaccgtgtggcacagcaggggctgggccggcagaggcccacgaagcaccgtgtggcagagcaggggcagggccttacctttcaggtcctccacccgggggctgcttggacggctgagcgagaagctggtcttggcggccaacctgccccccaacaccacctcgtgggacacaaccctgcggccactggtttctggaaggaagggagggaggggaggagggtgtgaagtagctggctcagacccctgccccgcctgctctcccacccaccctgccctcctcagacctctgcctcaactccccctttctgggacagcaccccactgaccccgggttccagcctgacccgaacaggagaggcagacatgcggtgagccagggacgcagggcagccgccagctctgcaggccccagagctgcacggaggccccacacccaaagtcttcgtcccctcccctcaagcgaagggggaagggcggggagaacagcacgggggatctaatggctttcgagggctttgagccttcatgggccacccagcctgcgacgccaacccagggcccctccgagtgctaatgcaggcggggacgggggcaggggccggtgatagcttaatgcagcctggagaggctgcaatgaaacgcccaggtctccgctttcttcctccccagagcttaatgcatggagctcgcccagccctgggcctcctgctttgaagaagctgccgcagctccattagcaggcggcccctcggctcggcttggagaccccactcagcggaggaaggcggctgacagcgaggacaccagggccaggtccgtcctacacagaagcctgggaaccaggcagcaggcagcccccccacagcaccgcgctttccttttgtctgagactgtggctgagctcagggctgtgaaggtcccagcgagggtcccagcccagctgccaccccaagagcaaccctgagcctcccccgcccacccgccaggactcactgctgaggccgggcacagcgctgggggccaggcccctgagcttcttgagggtgttcacggccacattcaggtagatgttcttgctggggctgcggtcataggccaccttctcctcgttcagtgcctgggggacaggcggtgcccagctgaggccatgcctgcctggtgccggggagccccagcggtggggtcgccatggggtcggggacttgcatctctcccaggcagctccgggtcacagctgcggctgagaggccgggggatgtctggggaccaccctggacccctagtccccacccgaccggccagataggaactccaggacctcaccttctctatggcctcctggttggaggtacagaacttgagacactcctcgatgaacaggttgagatagcgctggcggatgacggtggggactttgcccccaaactctttggggataatgggtttctttaaactctagagggaaggcaaaagctgccatgggtgagggcctccacaaggcctccagcggggaacgcagacgcgatgaggccgtgcccatggctggaggcaagagtgaggtgcgctgggacagatcagcctggctgcagtagggacagacacgccaaggcaagacaggagcagcaggggaaactgagggcagcggaactaaggtcatgggaaactgaggccatgggggcacaagggaacttgctgtactttctgctcaattttcctagaaacctaaagttgctcaaaaaacataaagtctattaattaaaaacaaaacaaggccaagcgtggtggctcacgcctataatcccagcactttgggaggctgaggcaggaggatcacttgaggacaagagttcaagatcagcctggacaacgtggcaaaaccctgtctctacaaaataaaaaacaaaattattagctggggtgtgatgacaccggcttgtggtcccagctactcaggaggctgaggtggaaggatcacttgagcccaggaggtcgaggttgcagtgagccatgattgcgcccctgcactctagcctgggcaacagagaccctgtctctaaacaaaaaaaaaaaacaccaaccaaccaa[162 bp omitted]atacaaaaacagccaggcgtggtggcgggcgcctgtagtcccagctactcaggaggctgaggcc[137 bp omitted]gctgtactgcggtgtggagcacgaaggcccgcagggcaggggcgaggctggccctccgcaggtcccatgtggccgggcctcagggcgtggtcttgggggtggtggtcctggccgagatgggaggggctacctgtaaggatggactgtgggcgattcgcttagggatgatggtggtggtagtcttggacgccatccccgacaatgtgcgtgttttcagctgctggccacctggctcagggccgttggaggactggctgccgctggccgcaagggtcctcttggcacctgtgggggctggcggggcacagggggtgtgggcacagggcgagtggctgcccatcaccacgtggcggagcaccaggcagccgcggccgctcagcgccagcagcacgtgcatctccgcgtgcagggggccgggccagggtgaggggctggggctgcgcaatggcatcaggctctagctgccttcaggcaagtccatcgaggcagaggacacaggtcaggctgcggaggccgctgaggacacgtcaccggtggggtggtccaggcctctgccacgtgttctgaccccaagcccaaggcgtcgatgtctgagggaaaggccctggctcccggacagaggaccgaagggtctcgggtgcccccacctgctcattggctttgccctgccctgcggcctctgtgttctgccttgccctttgatgaagtcacaaaccagagggaggaggccaggcctgcaggggctgcttcggagggctggccacgcgggcagctgcaacctgggcatgtacgtctgtgtggcaggggggcttctggactgggggctcggcaccgacccaggaaggggagctgtgagcagggacatctggccctagtctcagagcaacatccctcgaaatgccatctggccctggaaggtgcaagggaggcaggatgagtctgctcatgctaccgcgggccgcccagcaaggaagcaggctgcccgccaggctggcacgcgcctcttgcagtggagggtttgctcttcaggaacggacagagaacctccagactccctcggctgcacgctgggggcgagcccaggcagccacaggagtcctccaagccagatgagcccgccctgcggcactgccagcacttgggacgccagactcccttcaggcggcgggccccaagggcactgcgacagctcagcacccaccacagatcagcaacaggacaacccgagcgcggagacacagacgggaagcgtgtggggtcctgggataggcccaactcaatgatttcccctccctggggctaaggtctcagccgtgagggggctctggggaggggaggtcagagtagcctggagagctctccctaaggagggccgtgggatccatgggatctgcaggggaatcgccggggctggccctaaggctctccagccagcgccagggaggcaggggctccaaaccagcaggctgctcagggtggtcctcggacagcagccatgccctcccagggagcttgccagacacacagacctttcccagcctccagaccagaacctgcattttttaggagctttctgggggaccctcatctgtgacctgcctccagggatactttctcgctctacagacaccactgatgtgaagacgcaggagacaggacaaccccccgtgaagggtcctgtccacccaccactgaggcctggcccgactttctacaagaccctgctgggggggaagtgcccctcggagtaaaggaaatacagccccactcctgggaagacagcactcatttccatcagaggccacgccccccactcacacgccaggagaaagccacacctgcagaagcctgctccccacccaatgccaggtaccccgacatggctccccattccctggaaccacaggctcaggccctggttcagcccagtccccagcaggctgttggactcctagtaaccccggagctgggtcagggaaggaaggtgctgggccaggcctcctgcacccctcaacagtccccatttcacagacaggcaggctgagggccccagggagggggcccaaagtcatcccatgagcaagcaccatgtggttcaggtgagctcagagacctcagggtgccacctctcctgcccacatgcccacggccccccggcacaggccccctgggccaggactcacctgcagccaggcgggggttggggatgtgggcgatcctcctcttctcgccaggggcggaaatgtggacggagggcgacttctctgccagcctggcgggggcctgcagcaagctcgccgatgccctctgcgcctgctgggcccgcaggtagcacacctcctgcgccgtcgggggccgggccgggggcaccgcgggacccctcctcgggggctccacctgcgtcaccacaaatgctaaggcctggcagcacagcgggggcacctggagcaggcgaccccgggcaggcttgggagagggtggctggagctcgggggccggaggcaccacctccctggctgccttctgagctgctgggcacactggggggaagcagcagggggcagtggtcctcaatgccatgtggctccaggctcccccactcccagtgtctcccggtgcccaggctatgtcctcagccctgataaggcacgggtgggcgggactaccccgattacactggcactccaatccaatcccactacgcctaatcttcctcaaagcccctcctctggggaggctctgggactggagcaactgggactctcctggctgctgaccccggagccaggctctctgcttgtcctgcactacctcgccacgtctgcacaggggcctgacaagcgctactgtctccgggctacagaggacactggagctcagagctggacaaccggcccaggcccaggccgcacacggcgcagcaggccgtctgccgcactctgggggaggtcaccctggggctgctgacctgctctgtccctcgccccagcaccgtggcaatctaacaggaaggggcagggccagctccctctggaactcgggcagcgtcaaagataaggtgtcttcaaaaagctcatggaaaacgtgcgttgtgacgaaacttgcatggctttcaagtttttttgccccaaaataaactgatactaacttgtcataacatgtctgaaccagacggagtttgaggcactaaaaaaaagtaagacatcagttagaacagagccccagtcagagcaacaggagttctgctaaaattgaagcaaatgttaagcatcaaatttatggtaaaacttgggtggaagaacgaatggggaaatcactgatgctttacaaaaagcgtcacagatttacaggaacaatgtcccaaagaaatcagaagtttatgaatggataactcattttatgtatttatctttttgagacagagtcttgccttgtcgcccaggctggagcgcaatggcacgatcttggctcattgaatcctccacctcccgggttcaagcaattctcctgcctcagcctcccgagtagctgggattacaggtgcgtgccaccgcgcccagctaatattttgtatctttagtagagacggggtttcaccatgttggccaggctggtctcgaactcctgacctcgtgatctgcccacctctgggcgcagtgcctcatgcttgtaatcccagcattttgggaggccgaggtaggcagatcacgagaccagtctggccaacatggtgaaaccccgtctctactaaagatacaaaaattagcctggtgtggtggtgggcacctgtaatcccaggtactcgggaggctgaagcaggaaaatcacttaagcccgggaggcggaagttgcagtgagcagagatcgtgccactgcactccagcctgggtaacagagcgagactccgtctcaaaaaaaaaaaaaaaaaaaaaaacaaccaaaaaacaaacaaacagaaaacagagggatgaagctgggagcagtggctcacgcctgtaatcccaacgctgggaagccgaggcaggaggatcacttgaggtcaggagttggaagaccagcctgggtgacaaagcaagaccccctttttttataattttttttttttgagacagagtcttgctctatcacccaggctggagtgcagtggtgcaatcttggctcactgtaacctctgcctcctgagttcaagcgattctcctgcctcagcctctctagtagctggtattacaggcacccatcaccatgcccagctaatttttgtatttttagtacagatggggttttgccat[138 bp omitted]ggcctggcctctgcggaccttacctcctggccttgcttggaaaggtgggagatcctcctcttctgcccggggaacagagtggtcagacccgaaagccccttctcctcactcttctcttccttggggggctaagacacatgtccgtccgtcagcacaggtctgccctcgctgccaacaccaacacaccccaacctcaaactgcccccggcaagtggggaatggaacagtccagcccccaggcacagcagctgagggctcagggccaacagtccctgggctttgtgtgggtgcagtcggaggggtgggcaggtgtcacacgttctgcagatgcccaaggctacctctcctgggcacccagggccccagcttggagaccccagggctgcagaatgaaagcacactgggaaagcgaggccaccttgggccgaaccagctgctgcgggctgagcacttgggctcagtctgtgtggagtgagctccccctggtggccaatttggggacacggggccaggagacccaggggtccagggctggcccaggagagcaagagctcgccacgctgggagtagggaggagggaggggaggagaaaggagccggaggggatgaggaggaggcaaggagaggagacagaggagctggaagagaagagacagagatgggggaagggaggaggggagaagagagggggaagggaggaaaggggaggcgaggggagaggggctagaagggtgtgccggaggtggattcccctgaggtgggtgggtgggccaatatccccctgccagtcagtgggaacagaccgtgtgcacgtggccacagaagcctggctggtggccacgggccagtgacctctgggtgggtgaggggcaacaggagcaacagggctgcccgggtgctcctgagctcctgagatttcaacgggctcagggaccagcactgaggagctgcctccaccccgtgcctccgagccaactggaaaccactccagatagaaggtctctcaccaggccctcggctctgcctctgcccgagcccagccccagcacccgcgcgcctcacctgccgggccagccggcctctgtcctccgtcttgacgctggtggactcgttgaagatccgcaggcactcctccatggggtcggagtcaaagtccacctccttctccagggccgagtagtccacatccgcccccgcgctggaggtggaggaggaggaggaggaggaggaggatggggcgggggaggggggcggggaggccttgagccgcttgggcggcccctgcgcctccgggaagcccaggctggagtctgagtcggagtctgagtccgagctgaggctggggagggcagagggccacacgctcggcacccctggccctgcggcctcgtcctcactctcgtccccaaagaggtcggcgtggctcagggcccgcttcttcagcttgggggcgtcctgggaggcgccctcgtctagtgagcgggctttccgctccactagcttccccgacggggccttggtgctcttcctgtcgggcagctggagggggcggggtgggcctctgccggccgccggtcgggagtccccgcttgtggggctcggccgccgcgctggccggtcaggcctccctttccctgaggtggccacaggagtggccgaagatggcttcttcttggtcccttccggccgctctgccttgcgccgggggctgctggcctgcgggcccttcttgtccgcacggggcttctccacaggccgccctcggcccttgtccttggtcttgtccttcccctgggccccgtctttgcagctgggggcaggtggggccccggtttttttcttcttgggttttccctccttggggcagcccccatcctgtgaggactggacctgggctggggaggcgggcttggctgggggcggctggaggtcccccacgtcgcactgcacggccgtctccttggtctcccgcaggccgcccccctcggcctccaggccctctttggagggtggctgcccggtggccttgatctcagggtcggccctggctttgggggtgctggccgtggtgggctcgttacctgggaccgtggcggcctcatcttctgagtctgagaaccttgcatcgcaactgccaaaggggtcacagagcttcttgggagcaggtgtgtagggctcactgccgcgggagccccggggccgcttggcggcccgctcatcccgggagctggccctgctgaggtgccgggccgagtagttggagagagggtcatactccaggtctgtgggtggcctggagttgtccaccacgtacttgccactgggaacggggcggctgtgccgccggggctggctcacagccttggggacgtattccagggcaccgccaccccctccacctctgccctgacccctgtccagggacgccagcgagtacttgctgcccggctcggcaggggcggccagtggggtgggctggtagccggcatcagggcttaataggccgtggctgccggggctgtagtcgaaggccagtgggaaggcatcctcgtccgggcccacagtggggctggcgttggggccgcggggcgccagggcgggggcctcggcggagcggtgctcacgggtcgtctccagcagctcccggtagcgccgctgctccagctccacctcactgcgcacggcctcgatggcctggttgaccagctccaactccagcacatccgggcgcggctcctcccccaggcccagggtgccattctccctctgcgcggggggcttgggcagctcagggttgtaggggtcgtaacccagccctgaagggaacagagagcacagctgtgaccagcctgccggagaggagcccgcagcatgggggcggccccggtctcaaactgcagggaagggaagagacctgcctccgaaacccaccacgcactggcgcccgccaaggctctggggtgcccagctgggtacaggccatggcgccatctcaggccctgtgccgggccccgccttgccctgaccaatgggcgctggatgggcctgggctgcgtgacacacagctccctgggtactggaggctccctcacacggctcatgaaatgcgcacaatgaccatggtggggtggacactcgacaggctggaactccccggggcaggcgggtgtggagctcccagcattcagggtgccgggctgaggcaggactgggctgggccgacaaccacagcctgacggtggacacaggagagcccttcctcagccaacacggccccacccagccagcagtgtgcccgcggtgtggcggaggtgtgccagcagtgtgccagcggtggtgtggtggcggtgtgcctgcggtgatgtggctgagcagggccgggggatggggacatgcccagttgatgggccaccctgcaaaatccacaggaagattttttttttttgagacagtctctctgctgcccaagctggagtatagtggtgcgatcttggctcaccgcagcctctatctcccgagttcaagcaaacctcctgcctcagccccccaagtagctgggattacaggcgtgcgccatcacacccagctaatttttgtatttttagtagagatggggtttcaccatgttggccagtctcgaactcctgacctcaagtgatccactgcacctggcctactttaaattaattttttaatttcaaaactttttgtagctgggcgcggtggcgcacgcctgtaatcccaacattttgggaggccaaggcgggcggatcacctgaggtcgggagttcaagaccagccagaccgacatggagaaaccccgtctctactaaaaatacaaaattagccgggcgtggtggcgcatgcctgtaatcccagctactcaggaggctgaggcaggagaatcgcttgaacctgggaggcagaggtttcggtgagccgagatcacaccattgcactccagcctgcgcgacaagagtgaaaccccgtctcaacaaaaaaaaatttgtagaggtggagtctcaccatattggccaggctggctttgaactcgtagactcaagcaatcctcccacctcagcctccaagatagctgggactatagcccaagctgctgtgcctggcttaaagcacacggctgaaatgtcttcccggggggcagctgggaacatgagactcgcatgttatttacgtggttccagaacatagtgtagcagaccctcacaacctcaatgccaccaacgtcagcacagaagtcagaaccacagaagcctcccgtggggacaggccgaaggagtctaaagaaaacatgagcaagtggagcccagtattccagcgaagcaataaaaaccaagttcaaatatttactccagaaacttggaagttgaccattagaaattctactgagcacggccaggcacagtggctcacgccgatcatctcagcactttgggaggctgaggcgggaggatactgcttgagctcaggagtttaagaccagcctggatgacacagatcccatctcttaaaaaaatacttaaaaataagctgagcatggtgatgcacacctgtgctcctagctatgtgggaggctaaagtgggagaatcacttgagcccaggggcttgaggctgcagcgagccaggattgtgcctctgcactctggcctggacaacaaaacaagaccccagctcttaaaaaaataaaataaagttccactgaatgtaattccgtaacatctctaaaggtctctaaaggtcaacaggtctgatcctctggagttggcaggaaatggcgccaaagacgtctgcgtcctaattcctggaacctgtagatggtatatccccttagatggcaaatggggctctagatggggtgaaatctcccttgcccgtcactgagggggccatggacaggccgagatcttgcagagcagtttcgcaaccatcccatgcagcttcaacaccaccaccttcagactcggaatcctcagaacccgtgccacagacagaccgcacagggcaggtacagatgcgtctggtgcagccttcactgcaaaaacacaacaataaataacgcaggagatgacctagaagccgaaacgcaggtcacctgtggttaagggggaggcgtgcgccctggagggacctccaagtcacactgctatggggaagaagaggggcaaggaatgttgcacactctcacctttgaaaagcagctccacaaacccagtgagatcagattccaacaaaggcgcacgggcccacaccaagcccgcagtcccatggggtacagcaaatgcaatctggccttcatttatgctgcacccaacaccaactgcccaagagggacgtgaatgctgacacacatccccgacaggctgataaggagctgtgacaccatgtagcaaaaggcaacagccccatgggaacctgcccgcaccaagacgccacttggctctgacttgattctgactgaacgtgcagcttgtctgaaggtcgggcctcaggtgtgtttcttccactcagaaaacctgcctgcccttcggcccacctggagatcgacccccacagcgtgctaagacttccgtgcagagaaatggctggacgcagccaaggggaggcaggcacaagacctcccactgtgggcgacgcagagaacagcaacagaactggaggcttcccctatggcccccacccacaccccctcaagccccagcaggcataagaaagaaatggctggtttcggccggttgtggtggctcacacctgtaatcccagcactttgggaggctgaggcgggcggatcacctgaggtcaggagttcgagaccagcctgaccaacaaggaaaaaccccatctctactaaaaatacaaaaaaattacccagccgtggtgacccatgcctgtaatcccagctactcgggaggctgaggcaagagaatcgcttgaacctgggaggcggaagttgcagtgagccaagattgagccattgcactctatcctgggcaacaagagcaaaactccatctcaaaaaaaaaaaaaaaaaaaaaagaaagaaaaagaaaaagaaaaaaagaaatggctggtttcccaagctgctcccccgagacacacccaccagcagaacaaaagcctccccaggtaagtccccatcctaatccctgggacctgtggccaggccacctcactcagccaatagactgcaggtgcgacttgaacaaaggaccctgagggtgggtgaacatcttgcattatccgggaacccagtgtcctcacagggtcctttaaagagggaggcaggagggtgagagtcagagagactggaaaaggctgtgctgtgggtttgaaggggaggaaggcgccctgagccgagggatgcaggtgcctccagatgctgggaaaggcgggcactgactctccccggaagccttcgggaggcccagtcctgcccacagcttgacttgagcccagcgaggctgactttggacttcccagcccagcgctgagagagagtgtgctgctttaaggcccacggggacgaatgcagcctcaccgggtgatgaaagtgcagtggaaaacagctgcccgctgcctgtacctgcgaaggcggaaggcccctcctgttcccgggaaccctgcagggacagcgggaggccgggacccggaggctgcagaggaggtgggaggaggcctggtcacgggcagctgccgcctttcccttgaaatcacagcagtgttgtgcccatctttaaaattacatttagggaccaggcacggtggctcacgcctgtcatcccagcacggtggctcacgcctgtcatcccaggcacggtggctcacgcctgtcatcccagcactttgggagaccaaggcgggcagatcaccagctcaggagttcaagaccatcctggccaacatggtgaaaccccatctctactaaaaatacaaaattagccaggcatgggggcgtgcacctgtaatcccagctactgaggaggctgaggcaggagaatcgcttgaacccaggaggcagagg[187 bp omitted]ggcgagaccccgtctctacaaaaaaatacaaaaaatgagctgggtgtgatggttgcatgcctgtggtcccagctacttggaaggctgaggtgggaggatctcttgagcctaagaggtcaaggcttcaatgagctgtgatcacaccaccgcattccagcctgggcaacagagcaagatcctgtctctaaaacaaataaaattaagtagcatttagacaagaggaaggatccgtgtgtctgttttggaccactcggaactccgcgggactgtgtggagggccacgaggtacgggcaggcaggggaacatcacacagaagccacaggttcttctttgcctgtgccaggctacagccaaggcatttccaggaaacgtcaccccatgtgcccagcaggcgcagaggggcccattctggcaccatctcacagccaaggaccctgggagtcagcgagggcacccaactaggatcagcaactgtggctgccagttcctctgtgcggggagggacagctgccaggccaggaggatgctcccggcagggaaacggccggctggggctgggtgtcagcccccacccagggggagggctgcggaggccagcagcagctcaagggcgccctcccggcccacttcactgggggaggctccggctcctccctgacccagccggctgcagagcacgccaccctgccacccgcctggtgaacagggcaactagtgccagccctcccccagccccggaagcccggctgcccagtgacgtggaggggccaggccaaggccactgtggcgtgagctgcagagattcatgaaggggaggtgacagagcacaattactgaggaggagcaaggccaggtcagggagacactggtctcccctcccaaggctccagctaacggggatgcagagaggaggaagagcccgcctaacgggaaggctctcctccccaggcaggggtgggcagcagtgagactgggccccaggagggcaggcgggggtggaggggactgaggcatctctaaggggctaaggataagggactccactcaggggcttccacctccttgtcctggaccccagggctctaagacacagcctgcaagatcaacccagcccaggggagccaagagtcacaggcaatacacacaccagccagcagacacccgcgagcccttcccaaaggaaggaaattcagacctctggacattgtggactctgaaaggagagaccatttccccaaaaggtgcttttggaaggtcttggaaggaatagcacctgcctcccaggagtggagccaggcccccaagcagagcgcaggacaggtgataagggtccaatctgggggacgtgggcttgtctttctaactggaagcctgtgtgagtacttgttttgttgttttgtggagacaggcattgcccaggctggagtgcagtggtaccatgatggctcgctgaagctttgcctccccggctccagcgatcctcccgcctcagcctcgcaagtagctgggaccacctgcgtgcaccaccacatccagctaattcttttctttttttggtagagacgggggtctcgctgtaattgcccaggctggtctcaaacttctaagctcaagcggtcttctcgcctcggcctcccaaagcactgcttgtcttttaagggctgtgaaacctgccccagcctttagccaacagatgggaaagagcaggggcacctggaggccggagggcacactctgcagagggggtttcagcattttcactcccgggtggaggctgctaccacctccacaaagactgcaccaaaaagaaagcaggcatgctaggcgggtccgagaagactgagatcaggatctgcaccacggcctctcctccctgtggtcactgggctcccccaccctgcagcctgtgacccactggtgctggaaggcagcatcctggcctgggcgctccagccaggtctggaagtttcacacaggaagttgcctggggctcggccatggctgcctgcagctcagaacagggggtacggcgtgctgagcccctgaaaggtcacctgaagctggtacacaccactgcctccctggacctccctgtcccaccatgcctcagagggttggatctgggtacctgtcaggactggaaaggccccagggtggcatgtgcatgctgctaggtgccctgggagcccacccagggggtcacatctaaaggccgagtttgggccaggcgtggtggctcacacttgtaatgctagcactttgggaggcggaggcgggaggatcaccgaggtcaggagttcgaaaccagcctggccaacatggtgaaactccacctctactaaaaaatacaaaaaaaaattagccaggcctggtggcaggcgcctgtaatcccagctagtcgggaagctgaggcaggagaatcacctaaacctgggaagtggaggttgcagtgagccgagaacgcaccactgcactccaacctgggcgacagagctatacatgcatacacacatacatacatacatacacacacacatacataaatgaatgccgactctggaagtaggaggggcccgtccaggccccgtcccacggctgggaattactttggataggagcaggtgggctccttcctggatgtggcccaggtcagtctgtttctgggaaacatggtgaattggctgacaggaaaagcctacctccagaggcctgggagctgccccttcctccctgcttcaccccaaggccaggactgggaggtaccacccagccccagtggtcctgagaggccacaacgcctggctggctatcttccccagcctctccagccagggctcagcccagggcaacgcagcccagccttgtcccggcctaggagagagcccactccctacaccacccatcctgaccgcatctcctgagaccagtgccctgcagccccgggacgggctggatgacaaagatgatatttcttcccagggttctaggtgtggggcctgggaccagcactatctgcccaaggccatctcctggcccccaaaccttcccttggcccagaaacccctcaccctgggcatccactctcctctctgctcccactgcccccgccccaccacactcaatccacccacacagctgtcctgtccccagcaatggggagaacctggcatgagctccaaccccacacggagactgaaaggcagcaaaaatgacaagatcatggagcacgaagatcccaacctgaacttccagaacgttctctagtgagacccgtccaaactcctgtcttctctcagtcagcccatttcaaagatgaggacacccagtgccagcgagagccggcagctcctagccccacaaggagccccaggcccctcccacccagacggggagactcagtggctctaaagaacccggcaggctggctggacacgatggctcatgcctgtaatcccagcactgtaggaggccgagacgggtggatcacctgaggtcaggagttcgagaccagcctggacaataaggtaaaaccccgtctctactaagaaaacacaaattagccgggcgtggcggcaggcgcctatagtcccagctacttgggaggctgagacaggagaatcacttgaacccgggaggcggagactgc[131 bp omitted]gggctctcaacgcaaccaggcatcagcaggactggcccctccagcccaggcagtgggccccgcatgctggcccagaacaggccaggcagagaccccagatggaaacagacagtccctcccgcctggggcttagctggacaaaaaagataagcctgacactgcggcatgagataagcaagactacccccaacctagcccctgggggagccatctgggcggcctgaggctttgaaggtggagacagaagaggacattcccaaaacagccacagcggcagagaaggcacggggctgaccctcgcgaagcgcaaggcaggggctggttgtgtccacgggagcgcccatcccataacagaccctctgggaagaggggtctggaggacagcacccctgaagtccacctcctgcggacggcagagtaaccataaggtccccacaaatggccatacgtccactctgggggtccctgctcctggggcctcccctccaaccctcacagtgggacgtcctccagccccatccttggacatgcgggcgcccggggccctccatgcacagcccactggacagataggaacccgctgctcagaggcaaagggaccagcactctgcacccagaggaggtcccacagctcctagaccacacggggcagaaacagggtcacctggagagggcttcgaggaaaagtccagccagtgccgggggcctggacctccaccacccagcagcttccaataccctctctgaaatccaaggtggcccagctctgccccaccccccacaccagactccacccaggtctcagagcttgctgtggaggctgggctgtgcctgcagcagcggcacctggggtctaccccactgcccccagggttctcctcgacccccagggctgcgatccgagcctcccctctgctccaaggcaccgccctccccacctcgacagcgcagtgtgcagtgccaggaccgcccagcaggtggagccacacggcagggtccaggggagaaaaagaaaaaggtcccggcctgaccggggaccaccagctctgctctctggggcgtcctgggcatttattcacctcatggggcggccgtccccacatgccatgactggacgcgctgctgtcccaaggcttacagctcgaggctaggggacagggacggtaaccaggacagaggtcactgcctttcaaaacaatgtagaaacaggctgggcgcagtagctcacggctctaatccccgcgctctgggaggctgagcccaaggccgaggcaggtggatgatttgaggtgaggagtttgagaccagcctggccaacatggggaaaccccgtccctactaaaactacaaaaaattagccgggtgtgggggtgcctataaccccagctactcaggaggctgaggcaggagaattgcttgaacccggaaggtggagtctgcagtgagctgagatggcgccaccgcactccagcctgggcaacaagaacgaaactccatctcaaaaaaaaaaaaaaaaaccagctgggcgtggtggctcacacctgtaatcccagcactttggaaagtcgaagcgggcggatcacctgaggttgggagttcgagaccagcctgagcaacatgcagaaatcctgtctctacttaaaaaaatacaaaattagccagctgtggtggcacatgcctgtaatcccaggtaatcccatgcctgggcgcagtagctcacgcctgtaatcccagctactcgggaggctgaggcaggagaatcgtttgaactcgggaggcggacgttgcggtgagccgagatcgtgacattgctctccagcctgggtgacagggcgagactccttttcaaaaaaaaaaaaaaactgaaacagaagggtacaaatggcaaaggacaagaaccggcagggaggagccagcgggaccttctccccctatgcctctccatccctgccaagagcccaccttggctgtgagccactttcatggtccacacagagtaagttaagagtccagctctcagccgggcacggtagctcacgcctgtaaccccagcacttgggaggacaaggctggtggatctcttgagcccaggagttcgagaccagcctgggcaacatggtgaaaccctgtgtctactaaaaatacaaaaatcagcagctgggcacggtggctcacgcctataatcccagcacttcggaaagctgaggcgggcggactgccttgagctcaggagtttgagaccagcctgggcaacacggtgaaactctgtctctactaaaatacaaaaaattagctgggcgtggcggcgtgctcctgtaatcccagctactcgggaggctgaggcaaaagtatcacttgaacccagcagcggaagttgcagtgagccaagatcacgccactgcactccagccagggcgacagagcgagactctatctccaaaaaaaaaaaaaaagagtccagctctcagctcctcctcatcccagggccttttctgtccccaaaggacatttcccagtgggtgtttctgggactcctgtgctccccgtcaggcacagaggactaaaagcatccaggagccctgcagcctcttccaggggctcacagagaagctggagtgggcacctccacggggcgctgcccctcagccaggggttcacaggctgttcctaggatgggtgccgtggcgcctaaggaggaacccacacaccagggtgactgcaagcacaagctgtttttgttacttggtgacctgtgtgcagatgctggggggacggggtgctggctggcaatgtgggccgaccccggccccatcattcattcctccagcacatgttctctgaatacctgcccaggacctcagagagggcacgcagcctgcagggcacaaagggcagggccctccctctctgtctcatccacttccccaaagtccacttcctccaggcagccctccgaagtcctccctgcagaagcagcagtgcctggcatagtgcctgggatacagaggtggaaggcatggtggagccctcacctcactccacctcctcggccgtggtgcacggggcggtggccaactcaggactgcgcaggcccacttccatggcttccagatcctgtctccctagggcctgctcctgaggcagtgctggctcccttttggtctctgagggcctctgagccactgtgagaggaggagggaggggtctcagaaaaatggactgtgacccgtgaccgttaacagggtggggatggacctgtcgccaggacaaatggacaggctgggaagccacagggcggggatacgcctggagtgcacgccaggcccacacccccaagcacacgctctctgccaccttcctggccctgccccctgccaggctcttctgagcaccccagcgtcgacggagctggcccagggcaggtgtctgcagagatctgaggaaggaaggaaagtgggaaggggaaggaaacactgacccagaggcacgggcccctccacacctgcagcacaccgactctccagacatgagtctctgtgggaacaggaagagactccagaaagctgagaatcgcagactgcccaaccgcaggagcgctcccaggctggggacagatgagacagcatatcaacagtgagccccatcggcggcaagctcccaagcagccccaagcccagagcaggagaacatcccaggctttcctcgagctgtctccatccccagagcccacagccctaatcccacttccagccacaggcaaactcctattcatcctccaaaacccagcccagtaatcctgtgtttggaaacactcgccccacccccctgcaactctgagtgacacccgggcccgccccacgtcacccctccactccctgcaactccaagtgacagctgccctgtctcctggacccgggcccaccccacatcaccccctccgcttctgcttcccgagtcccctcagcctggcgccacagacactgagtctagatggacccagacagggccttggagggcaccaggaccagctcctggctttacagagaacactgaagtcctgtggtgtgtgtgtccaggctcagcccacagctcgtcccgagtcctcccccaaccactcctttcctgaggccggaagcaggggcaggtcccagaaccccgggctccaggcacgcagcctgtcatgggacgggaggcgctccgtcctcgcagccgttcccaaaaacctctcggagcctaagggagggatcgccccgaaacagccagtgcacatgcggctcctccaagggtcccagaggacttggctgttagaggaggaagaggaatggcaactcgagaggtccccgtgaggctcagggacccccaggattgccctgacagtctcccttctaccctgtttattttcttttcaggtttttgctttttgttctgcagcagatcataccaacagaatctacccactgcgcggacagcgtaaggaacaagccacggccgggcgcacccagcgctccccggaaacctgcctgctcctctctagggattgctttgcagaagggattctgagggtggggaggagggcggaggaggacagagttttctcgtcaaagtgaggcctgctacagcacagcccgcacgacgcttcccgtcacactcagatgccacgaccccatcgtgcagaagagctcgcagaggccgagggaggttcaggaggcaacaggctcaagggggtaacgcccagcaggaggaggccggggccttcctagcgagctctgccccacagaaagccaagcaagacgccttcattccggggtacggtctccagagggacagaggccggccactggcacctgaacctccagtctgcagtccctggaggagacggtaaagctgcacagggctctggggggagcgctctggggagcggctcaggcactgcaagagtccccggaacccctcccagcaggcacgcttgtccccgctgaccccagccccagcgagctgctctgcctctcccatctcaggctctgggggcagggacggtgcttctcagggtctctgcctctccctacaggcagagcgccagctcagccatccctctcgaaaacacaaaaacaggcccagcacagtggctcacgcttgtaatcccagcactttgggaggctgaggcgggtggatcacttgaggccaggagttcgagaccagcctggccaacatggtgaaaccccatctctactaaaaatacaaaaattagccaggcgtggtagcaggtgcctgtaatcccagctacctgggacactgaggcagaagaatcacttgaatccaggaggcggaggttacaggaagctaagatggagccactgcactccaacagcctagacgacagagccagattccgttgcaaaaaaaaaaaaaaaaagcagcagcagcaaagaaaacacaaaaacagcaggcggggccgccagaccggcatcctcatcctcaggactactgccccaagctagatctctgtctgtggggttgtccccagcactgaagggtgctgagcagtgcccctggcctctgccctctctgtgcctgcacccccaaactggcaaccaaaacatctccagacatctcctaacattcccaaggtgcagaaccgccctgtcgggatcagtcactgctctactgaagacctaagcaaagaatcctaaaatatgaataccaaaaccagcctcgactggcacggcccacgcctggaggcagctccgggcccagcagccaggttttcaaagctgcccaggcgctccggaagtcaggtgaggacctcagaaccttgggaaaagcccccccaaaaaaacagaatccaacctcatctgtgaggcagggtcccagccatggctcaagcacagcaagcccgggacctctggtgtggagtctggaggaggcccggcaagcggcctggtgccggactcggcaaaggaagccacacttctcctctggctcttccgtattctctgatgtttctaaaacaaacatttccccaggccagaaaatagtaccttcaaaagtaaagcacccagagacccgtggcaacacggacaggcccccaggccctgggaacccagcgcttttcccatcgccatccacctgggggagagctgccagcacaatcctgccagcatctgcaagaaggcggctgctctggaaaccccaggcccctttcctctaaccccctccacacaggaacatcaagagtcacggggcagcagagccacccactctgtggtaggagtgtgggggagggctcctcctcctcgaggccagggcaaagcttcaaccccccgcccggagggtcccagctccccgggcccagagccgcagctgggcgaagcttcaacccccagcccggagggtcccagctccccgggcccagagccgcagctgggcaaagcttcaaccccccgcccggagggtcccagctccccagggcccagagccacagctgggcaaagcttcaaccccccgcccggagggtcccagctccccagggcccagagccgcagctggactcgcaggctcgccggcgagggctgaaaaagaaacggcctcagcaccaccgctggttgtcaccactggggtcagggaagcccagggacgctgctcaacatcctacaacgcaaaggacagcccaccagacgacaatctggcccccagtgtccctagcaccaaccgtccctccagcaagctccatagctgccactccaggccaggcaggcaggcggccccggtggcccgattgcccacctgccacccgctggtaaaatcacccccgggtcctcatacgccctggtcaggcctggggaaccaaaagacaatactgctggctgcgggggttctcccctagagtccattccttcctggacgcggctcactgaggatgaaaagtcggaccgaggagagcacacactgtcacgtctctgaaggtgacacaggtggtcagacggtgccttcactgccccacggaaagccggctgtctcccatccaccaggaggaggcagcacaggacgcagccagcgggagctcctgaccctcctgagaggccagaggaaatgaaggcaagccatcctctgcagcgaggcgccattcttggcctccttctcccttctcgcctgactcggggcctcagagtttccgaggagagctggcaagccctaacagatcagtaggatcccagggctcacctgcctagcaggggtatgggaggctgtcaccgacaccggagagccaggcctgcttcaggcccatccttggaaggtttcaagttcccttctgtgcccagcccacagaggctggcagcaaaaacggcagaggaggcaggcagggccccggcccacccacatccaacccagcactgccagttaccagccacgcgtacacaggtgagcagcctcccggcgctgggcctcagtttcctcatctgtaaactgggaagagccactcccactgctgtttgggggtcacaggcagagtccgcccagtactgctgtggtagtggccaagtcaagaggtagggaccccagagcccatgtgaggggccacatctgaagagccagaaggaggaggacccctgcctgacccgactctgctagaaggctcaggagatactgggtacatggtggctgggcttcaggagatattgggtacacggtgggtgggcttcagtagatactgggtacacagtgggtgggcttcagggctccccatgtacctggggctgctccctgagcgcctctaccccaggactcctgccctctacagatgcagttctggagagtcgcctggagccccagctgggacgccgccaacagccccacccagaaccactggcaccgggctgccagatcctgaacccgactgcgggatccccgagggcaggagctgtgcgccccgcacacacgtctgccgctcactttgcagtataggatggccccttccccaggcctgggactgtcctgctggggcctgagtcagcctgtggcgcagcactagcatcccctcaacgtggtgccctcagcctctgcctccctcaggagaagcatcatctgggagcacgttcctgccggagctgtgaagccctgagctggggcccaccgcacctctggagagccctggactttcctgcaatcctccccggaagggttccctctcctggaagacagtgtcctgcctctcagtaggacacagactccctgagacaccacagggagtgcggggcagtgggcagaggcctgggttctgaggtcagatgggaggaaggtgggatctagccctgcccactccacatagacaaccgaggcccctcacctaccaccaggctgcagccaaggcccaggcagcagagagcggccactggggggatagtaacgctcattcccaactcacaaggctgggatagaacgtgcccctctaggccggggatgcacatccctgcgtcccagggctacacggtgcccgccgtaagggctgctggaccatccctccaagccaccctgggcaggtccagccggctctgaaatggctgtgcagcccagcgcggtgcttcacgcctgtcatcccagcacttcaggaggctgaggagagaggatcgcttgagtccaggagctcaagaccagcatgggcaacaaagtgagaccccgtctcggcaaaaattttaaacattagcgaggtgtgatgtcacatgcctgtggtctcagctagtcaggaggctgagccaggtggatcccttgagtccaggaggtcgaggctgcagtaagctgtgatcgcaccactgcactccagcctgggtgataaagtgagaccctgtctcaaaaattaattcattaaataaaatggctgagcaggtccagggataagagcccagaaggaaacctgagtccttcagcagtgctgctcaaggtcgccaatgacccgctgagcctgtgacccagggcccaggagcaccagccaccttcctgttcccgtcgcagctccgccaagcctcccaaccctgcctgccttggtgccctcatcagatgccctctccttctcccagaggccctggaggctccagccctgccctggccaggtggtagtatgggcaaaacacgttcctcgataagcctccgtttccccaccggcagcaaatagctcacagggtcaccatgcagcgcgtgtccagcacagagcatggccccacaggtgctccagggctagctgagggcttttcacctgaacctctgtccactctcaatcctgggaggccagcgttcctgtctatctcctctctggaggccgctgccctgtgcaccctaaaatccccttgagaagacatggcaaaggctagatcacgccagcctcttcaaatctcataggaaactgggtgtgtgtaaatctggaggtgtggacatgggacatgcatccccccctgtcctcagagggcagcctgatgaacatgtcacggaggcggaaacagagggtcagagaaacctcaccgcaaggaagatggatcctgccttctgcggggggaggcagtcttctaccagacagtaacaagaagccctaccaccccaccagagatgggaaaaggagttcattctcaccagcaaaagggaaatgcagacacgccatggtaagaggcaggcagctgcctttttcccataggaacggggggcagacaggaagacgacatcaccaaagggaccctcaaaaataagcctttgggaaacaaatgagccatttgggatgcagacagatatcataagcctgacttgcgccgggtgcagtagctcacacctgtaaccccagcactttgggaggccgaagcaggaggtcggctcgaggccaggagttttgagacaagcctggacaacatagcgagaccctatctccacgaaaacatacaaagttagccaggcttggtggcacccgccgcccatagtcccagctactcaggaggttcaggcaggaggatcccttgagcccaggaggtcgaggcctcaaagagctgtgatcgcaccactgcactccagcctggactatagagtgagaccctgtctctaaaaatagggttaaaatgagcatcgtgagtctggtgtcacagcctccgagaagcctctcccacgcgttgccttcttcaccaactcccagcccccgccaaagccggctgcgtgctcccaggacatcacgacctatgctacgggatctgtaggcacagctgtcggcaggtccctgagagcacagccggcatcgtacgcagctctgaatcccccgcctcaaacacagcgaagacgctgggctgtggggagctgacaagtgattgcttgcatctgtccacctgcaaacaaccgcccacaggtgcaggtgtcccaagcacacttatcagggaaatcagaaaaaaatgctaccttttctggcaaaacaggaaaataaacctattcttaaatcctagagaagatgtttctcttttgcaggaaaaggttctgagctgagactgtttcatggttaaagtaaaaacagtgcttgaaactcacgcccaatgaggaaatctgggacgaaggaagtcaggggctgggtgaagcagagagccactatcaagggacagaggtaacaggggagtctgaatgacatcacactcgataaccctccctccacgactttccttgcgatgtccctctttttctccaatccaaatcccacatctcctccaagaaacgctgccatgacgatgaaaaccaccatgacgctgtgaggtggagtccaccaacgtcctctgcccgaccaaaagcatggaattcctcggagcccactcgagtaagctttgacttcctccctgccagtcatgctggacacagggctcgacaaacacaagagacgatcctcggaccatcctaactcaacgactggagactgaggtggccgctgccagaggcgcggccggaggaaacgtcatggaaataaacaagggcggccacaagcacatggggtccgggaagcggcgggcgccaatcaggggcaggaggagtccaggacctgcctagcgccggccgcgcccgtctcccgagcccccttgtgtcaggcccggtgcccggtactcaacatgcgctcgcactccgccctctagacagccctggcaggacgcgtcctcctagttgacatttcacactcgtgaagacgaaggcttagggacatctagtgctttgcaccgggtcccagggtgggtggttccggtcccgactgggaaaaccgtcgcccgcgaacgtgtggggaggaggctgggccgagaacggggaccccgggcgggaccggggtggggtccagacccgggcaggggagccgagcccaaggcaagcaggcgggcgggcattacctgctgcggggggcgcctctccgccgtcaccgggcgcgccggagccccgggccccgcggtgccggaagtggcagtagggccgccggcagggccccccgggcgccccagaccaataggggcagtcaatggcccggaagaagccagtggagcgtagcatggtccgtcccgcggcggggccccggcccggagccgcccgggccccagggccccctcactggcgccgcggtcgccgccgcccgcgcctcacggaccccgccgccgccatcttgctccgaggcccccggaggccctcgggacgccgccgcaagggaccccgggaggggctgcccgcagcgcgcctgctcagaaacgcctgctcctgcgcgaccaaggctggtgacggacccctgggccgggacagacggccgcgggaggaagtaaggagggcaggggctgccctgcctgcggtctccgggagcctcgccagcgccgccgcccgaccttcggcggctgtagcggcgccatcttgagccccaggcccctgcggcgccagggctgtccacggcgcgcctgaccaaaaaagccccgcggggcccgctattactcatttgcatattatttcctttcgttagcatatcaccttaaggcgccctctgctggacgaggagagttctgcggggaggtggccttaaacctgggccaggtgaaactcatggttgaattactccgttcacagtctttaaaaatcccctcgccctggtatacagctggctctcaagaaacgccttaatctccccaacctcgactcttgtcatcagtctaatgaccaggtccacgttcactcatttgttcaacaaatattgagcgcctactgtataccagctagagggtgcattttaacagacaaacgaggaacaaggctgggatggggcaactctgtagtctggtggagtaggcccacgtcttaatgggaagtttaacctggtgcattttggtgggattgtaaaatagtgccactgctatgtaaaacaaaaaacccaaaaagtttgtttttaagagacagggtcttgctctgtcacccaggctggagagcagtggtgcgatcacggctcactgcagcctcgacttccctggctcaggtgattctcccacctcagcctcccgagtagctaaaaccacaggtgtgcaccatcatgcctggctaattttttgtattttgtgtagagatggaaaaagttaaacagaattaccctatgagcaactctattcctgggtatacacccaaaaagaatagaaagcaaagtcttaggtcgggcacagtggctcatgtctgtaatcccaacactctgggaggctgaggcgggtggatcacttgagcccaggatttcaagaccagcttggccaatatggcaaaaccctgtcctactaaaaatacaaaaattagctgggcgcgatggctcacgcctgtaatcccagctctttgggaggccgaggagggaagatcaaccgaggtcaggagtttgagaccagcctggccaagatggcgaaaccccacctctattaaaaatacaaaaattagctgggcgtggtggcgggcgcctgtagtcccaactacttgggaggctgaagcaggagaatcacttgaacctgggaagcggaggttgcagtgagccaagattgcaccactgcactccagcctgggtgacagagtgacagtccgtctcaaataacaatacaatggttaagatgacaaattttatgttatgtgcatgtgattttaccacaattataaataaatgacaggatgcaatgatgaggggacgtgggttgggatgggtcatgggcgactctgcagaggacctgatctaatctcaaagctgtcctatcatgggcagtggaggcgtagactccctgtcatggctcctgatgatgcgtgagagatgaactctcatttatgcgattgctccatccgtgccggctggtgtcggtcattcattcagcaaatagttactgagcacctactgtgtgccacaaaatgctagaaacatccataagcagagcagagaaccccactctggtggaggtgatggtgtaggcagggaggccgacaatgaacacagcaataagtgagacagcctgaagccaggtggaaagtgctttgagaacagaaacaggagaagagcctggactgggcacagggctggtctgggtgattctatggggaaggcgggatttgtgcggttttacagaaaattaggggccaggcatggtgcctctcgcctgtaatcccagcactttgggaggctgaggcaggcagatcacttgaggtcaggagttcgagaccagcctgactaacatggtgaaaccccatctctactaaaattacaaaaattagctgggtgtggtggcccatgcctgtaatcccagctactcgggaggctgaggcaggagaatcccttgaacctgggaggcggaggttgcagtgagccaagattgcaccactgcactccagcctgggtgacagagtgagacagtgtctcgaaaaaataaaagataaataaataaataaaagatgatgagggagccaagcaggcttctggaggaaaagcattccgggcagagggcacaggccatgggcaggactgcgcctggtgtgttggaggaacagcgaggaggccagtgtggctggaccagggtgaggagggggagagaggcaggagggaagagcagggagaggacggggcaggtcatgcagaaccctatgggcctcagggaggacttgggctttgactgtgagggcagtgggagccatggagggttgcgggcagaggaggaaccagacttgccccaggtgttcacggacaccctctggtggccgtggggaggacaaaccgtgaggagaccagggccaaggtgattgcactggttcaggtgagtcgtgaggaggctagaccgtcgcggtggaagcccttacagcagggaaaggcggccagatcctggatctattttgaaggtagagcccaaggaggtttcagatgggccagatgtgggtggtgagacacacagtggggtccagggtgactccccaaggattttggccttgcaggatggaactgccctcgaccgaggagggggcatggcaagagcagcctgcgggtgggagggacgcccgggagggtcggggtcccaaaggcaccaaaaggatggtgctgcttctgggcacgtgtgtgtgctgggggtggggcgtgtaatttaaaagcctaatgcgagtgtgtccgtcagagagaggggtgaggctgcgagtgtagaccccatattctagacattttgctccagaggggcagaaaaccaggcaggagctggaggggtgcgagagtcccgggagtgatgtttgtggggcgtccggtaggatgggaggatgggtcgggcaggattgggggtgcacgagggaggctgccctcgagtaaagccgggaatttgccgcccaggttggggaggggtctggcgtgagccggcgccggccgcgcgatacgagaggccgaccacccccttccccgggcgggcagcaggcgaagccccagggctcagcaggtgtgtaggagtggcctgcccggccccatcccagccccgccggcctccaggctctggggagcgctggagtccacagtggttttttcctggggagggcctcaaagctctcaccgccccctcttccctattcccactaggggagctggcatacagtaggcgctcaatacaggagcacaggagcctgggaggcggccgggggaccctccgtggaggagcctgtcccgcgccggcgagcagccccgggggcgcaggctcccccatcccctgcggcaccggaaggggcgggcggtggacgcccccgggcgccctgtcactgtgcctcggttgccaggcaacggggcgggcgggaagctgggcggggggcgcagctgcgccaggcgtgggtgacacccggcgggcgcagcgcgcgctgctgcaggcagccccctccgcggggcttagggctaggggcagggcattttgtgtctcagccagaggggcctggccaagacccccttcactagcccgctgcctcggtttccccacgaggtggatgaacttgggaccacactggtgggtgggacagagggattcagagcgtgcccacaggtggggactgccacgggagagaccacacacacgctggagtagggtttaaaaaggggcttgtttaattaattaaatacaaggatgaggccaggcagggcgggggaggggcgccacccacggaaagcacacgcctctcggagccgcctcccctgcaaacggctggaaccaggtcccagtgatcagcgactcctgggagagtggaggggtgggcgcaggtctctccaagcccctggacactggagaggggcccagttatagagttctggaacccacagccctacctacccctgctccagacaggcccctgccagggctggggccaaccaagactcacaaaggaaaacggggccccagtcccccacccacccccacagactaaggcatctcactagcgctgccagaagagggtttgaggctagggacagagaacacagagagccgagggctggatggggcaggaccctccgagcccagctccagaagggcgtcccctgcctccctccccccaggatcccaggcacccatccctggatcctgccaggccggggctgggtccaggtgcacaccagtgccatccaaagcccccctgtccccaagcgagaggcaggacggttctggaacaaaagggggtaccaaaaacctcctgcagccaacagtggggggatccacctttctgggtctgacatggaaccggggacccttctcattccaggctgggggtcctcaataccccccccaagaggaaatgcaacccaggccacagcaggacgaccgctgacaaggacacaaaggtggcccccgaggaacaagtccccaccccacccaagttcagctcagagaccccccacacacactcacaccccctgaggatgccggaccacccatgggggcccagaaaaaaaggaatccgtgcctgaaaaaatattctacccggtgcaaaaaaaacgagctaccccaggaggctgcacagccagccctctgcttccagtccacgaggcaagacctcaaccacgggccaggacccacctcttccaagcacccaggagaaggaggggaggccagggaagcagggccgggccaggctgcagcccaggcccggaagagcctgcaaccccggcgggcatgggctccacggccccacctgcaggccagggagggcagcgcagcccaacagccgcagtcgtcgttaagggagagttgattgtcacgtgataccgcaacggccaaagtcagcaaggcagggactggaggcccaagcccggtgccagcctcccctgcagcctctctcacccacccacccagagagggcgagctagggcccccacacccgaggacagaggaaaataaataagccaggattccctcccgaccccactgagtcaaatgttctttggaagaacccagaggtcccctccctccccatcccaggtctcagaagcaacacctggagcccctccgggcatcctaacgctgccccactcctggctctacccccgaggtctggggggccaggcagcccctaccgtgggcagaacttgtggacacctgagattgagtacccgaatggggggtggctgggctgcacccccatttccctgaactactcccatggctttcggtggggtgggggtggggtggggagaggcaggggccgtgtcaacccccgactcctctatggctgtctgaacacttcatcccaatctgcagggatggggcagggggtgctttccccgggccggctcccagaagtccactccacccccccaaaccccaccccgggaggggggcagcagggggtggtggagaggagaggggaggacctcctagctgccctgggggggccccgttgcacagatgggaagaaagttagtatcatggctatttacagacacaagcccccgtcacccatcctgagagccacctctgaggtcaggcagacccaggtccagtctcaggccccctcctcactctctggaggggggcaggggtgtcttcagggtttgcccacggctggaaggggcccaggctccccgtgggtcctcactacacccctggatggcagaagcatcctggcggtcagggtgggctgcacgagggccctacaggcctgcgggggctgggctgggcgcggggctgggcgcagggctcccggccaggctgcagggcagcgagtcgctgggggaggtactgcgggcaccagggcgccggagcaggtccgggtggaagccggggtggcggcgggcgtgcttggccaggtggtcactgcgggtgaagcgcttggagcacagagggcaggagaagcgcttctcgcccgtgtgcgtccggtggtggcgggccagctcgtcggagcgggcgaacttcttgtcgcagccctgccagtcacaagcaaaagggcgttcccctggacggagagacagagacagacagcgggtcagcgggggcggggggagatgacagacacgttccagcagatcccaaagggtggcgggcatttgtcccgtgccgttttagaggctgagctctggtgtgagttcaaaacatggagaagcacaaagaatacaacccttacccgccccccggtggcccaacacgagaccctaataaataatcctcttatttcctaccagctcttagaaaggactctccggcgagcccagaatctgttaaccgtaagtaaccgccgcagacccccaaggctgaagctccccaggccctcgcagcctctggccccaggcgggaccctggcagggattagcaaaggcctcccagtgtctgtcccaggcacaggcacgctcagaaggcatgctcggccttcaggctgtccctgccccccacccaggggcatgcaggggcctccatctgtgcatgatcccctccttttccaaatgaccacctgggatgcaaaggctgggttaagggggtacaatcatggcaacctccctaaccctcctggcccctccacgagcaagggggcatgggaggaacccgcaggcacagtcagtctgggccccgatctcggggtgtggttagatggaagacaggcaggaaagctcacagggaggggagggggcggggtctcccgggaaggggcggggcccggcgggctggactcgccccacccccacgggacagatggcgctgggcaggggcgggccaccacccggccacttcctccacagtcccctcccaccgccaaggccgggcctcgcccatcctgcccctaaccagccgtcaccatctgggcctgcctgtgcgcctccaggcggtgtgggtctttgctctagaactgtgccacccgaccccttcctttagccggggtctcacgcccacagcatgtggcatcgtgatgtcagcgtctccccagcagataggggtctccaacgactggggaggggcaggtcagtccacctccacccagggaccgaagcaggacaaagggccctgcatccccgaagctcccaccctttcgggccctgcaccaggtaccctggaccctggcattccgggacgttattcccgtgacaccccagggtgggttgtgtggatggagaccggatgtgcatgcccctcgtggcactggttggagccctgagtagcaaaagagacgtcagaaccaactcccctgagtggccccaaagcctattctcaaggaagccacagcagggccaggagggtagtcacccggtgggttacaaactgggcagcccacgcccagcactggaggttgctctggccctgggagcactcccaccggtccatgaagaactgcagccagccaggggcctagaaggacccacagcagggaccatggtgaggggtacagagacggcgggaggggcacggccatgctcagggtgaccgagtgacatctctgctctaagatcaggggctgccctggggagcccagctgaggaggggcacgggagggtggaggggtctgcccactgaggggcaccagcgatcacccgtgacccaagaagagctggaagaaaaaaccttcccttctcatctcatccttcctccctgccacaccccgacaccctcagcaaaacaagactgcagacagagaccagcagcccccctccccaagaggttgtgaatccaggcagctggagagggggagagaccagctgtcaccaagaccaacagtagcctcaaatccctggggctgcctgctccacaccccaagtctcccccaagcaacccaggatgcagctggggtcgcgggtccgccccagctgggggccgtctacaacccaagcaagaggcgcagagcagccctggaagggaccccactcccatctcaaccactgggccctgacagctcccaagggcctcagtctggggacggggtctggctgtgggagcgcggctggagcagaccacgggattggggctcgcgcccctccagggaacatgccgccgtgtcgccatcttgcaaggcacaggcggggaggcggcaggagggaagggggaacatcccacggctgggtgccggacagtcagttggttcacttcccctttcagggcggcggggctggtctccactccctctcccccagttccactttgcaaggaggagcaggttgccggggtggggggggcgaccggggcaggggcgcgcagccgctgggaacacagctgccgcacgtagctcggcggcggcggcggggacatccgcagccccagccggccccgctcacgtggtcccactcccgccggggccagggggcccgggccagggtcgcctctccggcctgggtgcctgccagccccgccccgcgcttggagactgaggcgcgcacatgcgcacgtgggtggcggggcagggggtgcacgggctacccacccacgctgcgctgggcgaagcgcctctgcgaaatgccaggccctgcctcgcacacaatccactcgcagggaggagggtggggtgaacttgtgggggcccagagcgcgctgctcctagccagccgggcccccaggtgcacagccacccagctgctccgcgctacctggccgagacgcagcgccctgaggatgcggtgggtggggacaacgcgggagggcagtgtgggcggggccgcggtggacttgaccctctgactcaggctgggcccgggtgagctcaggacagcctcggaaacaggcaggctcagaaaaatggagtccaggaagtcctggaaacctggcccggccccgtctgagccggcacaggaggggcctggagacaggactgcgggactgtgccaagggccctggttccgacagggaagcctcacctcctgagcttgtctggggggccttggggtggggaggggggctgtggccggctgcctgccggggcactcacgtccacctaacaggtggggtcgggtctgtaggggagggcacaggtggggaagaccagccccagccgcaaagcaagcatcccaggagagccaggaaaggctggggctggggaggcctcttacccacccagggaagggaggagctcctgaaggtgatccttgagcaggttctatagaacctataggcagctgcttctgggagccgctgcagaaaagggggaacactggtggtgaggccctgccagcctgggggtggggtctcgaatactactgggccatagcaacccccacacccactctgcccctagctcccctgacttcccaaagccaaagcttccttcctcccccatccccactcctccagtagacttcccctttccaaaccccctgctgttcccgccaaacacgcaggcaggcatacccacccttgtgtcaatcccgtacctccccacgtgccacctgccagccaaatcccatcaccttcgggatccgtccaggccccaccctgcccctcccagctcactcctggactagtgcagtagtccagcagctcccgcctgggcacccagactgcgcttggctttcctgagttccgccctggcctagggtcaaaactgatggctgatcctgcccggagcttctctgagcagcagtgcccctcacagtggcctggtgccccccaagcacccttggtcagcttctctgtctttgtaccaggcttccaaaaacgcatgcatcttgtgggtgtaatatctgcacccctgcactccagtgggagcagaaggcaggcacttcattgacggctgggtccccggcaatgcccagcacaggcctggtatacagcaggtgcttaatgcatatctgtggaaaaggagaatgcaggcctaggggatcaagctctggttccaacaagagcaagggcagataatgtttgctcagcatcttgaatactcctgtcctccccaccccgccgccaaactatcactactcccttctacataaaaggaggcccacctgaggcccaacccaggccaggacctcctgcaccagactctgggtacctgggggtcggcaggggacaaccccctcaaggaccctggtgcctgtgtaacctctgttccagaaatggtctaagccagggtggtgccccccgcccccacagctcaccctgctggtatcatgtgcctcctccccaccgatctgggctgcttttatcagagagcctgggtgggggtggttatcgccccccacaaccctgggggagccctccccatcccactagctggggcacctgcaggcagttccagctgctctctgcactctgcaggctggagaggcggtgggtgggggagggcagtccctggccccctaccccccaccccctatggcctggcactgccccactccgaccctccccagataagctgccagttctcccaagctctgcccaccagcactgccatcccaaccctacaggagcgcatagttctgcctgggggtggaggagagaatgaagtggggcatggctgcttccccctctgggcctcagtttccccacccacctgtcctcctggggccctcttcagcaagggatcagaaacctggcaggcactcagacactcctctgcacacctcgtcctgaggagtctccctccaacccagtgcgtagaccagcacgcctcgatccctcccacatctcgtcctgccctcctcaacccctctctgatcctaatcccttctccataaatggatttgcctctgcaaagcccagcctgcctcactgccgcccccagcgtccccaccctcgggattaagtgcagggattcaccttgccgaggtgccccctccccacctcaagtccctacctccacagcagaccccagagccagcacgcccttcctctcccattccctgccccacccagcccagtgggcctcaggctgcctcctccaggaagcgctttccgtcatcactagcatccctgttgccaccccccaccccgccccccgccaccacggacacagttccctaagtcctggggcgcggggactgggatgctgggtgctggcctgcggcaggggacttcagagtgggatacaactgggggtgaccctgcagccccctggggggcacctgacaaggtctggggacatttgtgattgtcacgactggggagggggtgctcctgccatggagtgcgtagaggctggggacactgcataaccccctgcagtgcccaggacagcccctccccagaaaacgatcaggccccaaatgtctcggtaagtgcggaggagagaagccctgggtgagaagaacccttccaggtctgagcccctctcctggggagggtgtcggcaaaccctctggaggtgcaggctgacggtgtgccgggcactggcatgccgggggcggggggggggccctccggggatgcagggggtttggagagcagggagccgacagccagcctctcctcccgcccccgccccaactcgctggctcgctcactctccgtaaccatagcaacggcgtcaacatcacccacagcttccaaagtccttccccgccccacgcaggggagagagagccgagagctggccgggctaggataggggctgtgggccagacccaggggacgggaggtgcagtcctgccgcctgctgcccccatgaagaacatcccactgctcccctggcctccctgctcccagggccaaatgtggccgaaatcacaggtggggctcctccagtgtgcctcagttggtttatctgtaaaaatggggccaggccacgactggtgttccctttacagagaagcactccaggcaggggtgggtgggggtggaactcgttctcaatggcccccgggacagccctgcagccaccggtgactcgggttcgtctgcggatctttcccggcctccactccattcagggacagccctgcaatggggctccctcccaaaaaaacgcatggccttcctgtcccccaaaaccagcttaacggcagccattccctccctcctccgggggctgaaaaaccagaccaccttccactaaaagaggccgtttacacagaccccttggtggtcctgggggctggggaggcccggaagaggagcctggaaagccacaagtatccaaaaccctttggaaaccgaatccaaggtgcctgggcctgggactgccctcccagtccccaaatcgttactgtaaagggggctttggaatgggacgtcagcaggctcaaggggtgggggagggtgccaggagatccgccctgccctcccccaccacacagggtagacggtggcgcgccatcagcacaactgcatccacccctggggatgcccgactgggcacccccaggcctgtttcttactgcaatcccgggataacaatactgccttcccaggactccaaacccatccctcccctccctgctggcttagggaccgctgccccaatacccgggggcctatggaagcgcctcttgggtgccactcagggaggtggccatcccgtccacttaacccagaaactcagaaaacccaaatggagctctcaggccacgccatctggcaagaaaagaatgacctgggtagacaggtgggagtcgctttcccaacaggctcccacttcagccccgtctgttcagatcgcccaacttacccccaaaaagccagggcactcctggacccctgcccaccgcccggagaggcacctccctttctgttcccaacgctgcctcgccatcttcacagacccccaatgtccctccccgcggagatacacggaccccattgccctcaaaaagaggtaacaccctgggacccctccgccgaggatgtgtggctcctcgcagaaaacgcagaccccacccaagtcctgtcttgacgccctcggttcccgtctgtgtctcaaggtgggcagagcctccaggcccctgggaccaggacagggactgagcgaggggtgaaaagagtgcagaacagagagggggcggccggcaggctacacaccaccgcccccacccgccctcctgctctccaccctcaggcgtcccagcgcggctccccataccccaaagatggaccctcaattcttccgcaaggcattcgcggcccctgctcatctcagccccaccactctggacggcccacttcccttcggctgctccacgtgtccctacaatccgagcccacggaccaagcctccttggagtgtccagctgcccaaagcggccaccgctatggctatgaaatagaggcagcatcgcactcttgatagaaatgagaaaattgagacccagatcgggtagaggtcttctgtttggtggcaaggccagaatgccaagcccaagggcagccgcacagctttcccccagccccccaccctccccggaagggacaagcacctctaatgcccaaaccagggccggccatcaaggcccaccgtcccctgttgcccagtccaaactcccagtccagaaagtggaaccctaggaggggacggagtgaaaaaatacagccaggcccaccaggctcccggttcccctcgccgccccggggactgcgctaggaggggcgttggtgtagccgaagcgctccaactacgcgcaccttcccgaatcgcccgccaggtaggggtgaacaaacacgccagggaaatacagcagtgtggacccgagcccctcgagggtcctccaatactatgaagttcccccgcccagactcaggccccaacccgcgctcctagcctcgccctccccctcgttaaaatacagagaacgcagagaaaacgtgccgggctccccccatcctggccccacgccaggtgctctgccgacctctggggagaatccgcgcggccaccccggcggcggcgacgcggttcctcctccattttcacagataaggaaactgaggctgggggagggggagaacccagaaccccagagccggatgctccaaccacggtgcccaccgcccagaccagaacgcaaaagaaaaaaaaaaaaacggaacaaggcccagaaagggagagaggtggtctgcccaggagtctcaatcccgcccgcagacctcgctgggcccccggagcccccgccactgccgccggggcggccatccgctcgccgcccgaccgcgtggccgccacgccccccgcgcgcgccccacccaccgaggccccgccctgccggccggcgcggcggcggcccgggcgcgcccccctccccgccccccacgcgccacgcagtttcggggtcctggcgggggaggggtctcaggcggccgcccccgcaagggccgggatcgcggctgcactcacctgtgtgcgtccgcaggtgcgactttaggtgcgaggacttgtagtaggctttggcgcagtccgggaagggacagcggtggctcttggcggcggcggagggcgcggcgccgggggcgcggcccgaggacggggacgaggcggctgaggaggaggaggcgggcgaggcgccccccggggcggctccgggtccgccgcgcaggtcggccaggatgctggcggccagcaggtggggcgccgcggcggcgccggggcccgggccagaagcggcggggggcggcgggggtggccccggggtcccgggtgaggcggcctcgcggcgcgccgcgcgcacatccaggccggcggcggggcccgcgccctcggggccgggccgcccgcggtgcaccacggcgcccgaagagatggccatgagcacgtcggcggcgaagtaatccacgcacgccacggccgccgacatgccgagcaagggcgcgcggcgcggcgggcggagcggaggcggcgggagcggcgtccgtccggccggcggcggctgctcgagtgcgggaggcggaggaggaggaggaggaggcccggcgcgcgccgccgccgacgcccgcgctcggcctgccccgccccgcctgacgcgtcctgacgcaccggagcccgcgggggcggccacagcccgccccgcccggaggacgccccctcggggcgccgcagccacgccccccgcccggcgcgccctccaccactctccgagccgcgcgcggccgccgggggcggggctcgggccggaggaacccgccccccggcgcgcccactccggcctccgccagcgcctagcgtcttaggcccggagcgcgccttctccgcgctagggtgcaaggccgggagccccgccccctcccggcgcgccccactccagcgcgcgcccccgtaccctttcccggagcaccaccccctcaagccggggcgggaggccgaggaccccgccccctctccggcacgcccctccttccgagagcgcgccccgccccatcccggcacgcccctccctcccagagcgcgccccgcctcctcgctggcgcgcccaccccacgccggggcgcgcggccggcgggagcccgccccctccccggatgcttccctcctggccccgggcgcgcccccgttcgcgatggaggagggctccgatccccacgtggccggggttggaggggtgcggaagcggccggccccgcccccaggccacgtgcgcgacccttcccccctcttctcccggcctggggccctgctttgaccccgcactcaggcatctgctcgtcctcttctctggggttccccctcgccgctcacagagcccctcggagcctcccggccgagacacccggtatcccgcgcccgcggcggggcccgggagggtggggcaaggctgcgttcgttcctctttttgcacccagttccggagctactagagcgcgccccactgggggtggggagggccggttgggtcccagagggtcgggatagggggacgggaagagggggccgaacgcaaagggctgggctgggctgggggcgcctgagcgggtcagaggttccccgccctgctgggacaccggggtccggggcttctctttccattcccaggcatcgattcttggggttcggacgggaaaactgaggccaggtattcgggcctcccggccgcgaggacgtccaggccaacttgttaaatattaggggggacaccagggacgcggatggcccagttcgcaggcccaaggcggcgggggcacagaaactgggcggcccccctcggtcgcgaccgcgctcccgccccttcccagctccggcggggcggcggggactgcgcagtggccggagctgcctccagggggcggagctgctttggcctgcggcgacctcctgctctgggttgggcatggacagaggccctgacccgattcggggcttctctagccccatcccccgcccacctgcaaccccagctgacgccctgaggctgaccactgttccctgggtcgcccgcactgcgcctgggctcaaccatgcttggttaagccagctgagccctccctgggccccagtaagcccactctacgtggctggacagagcggagccgagagagaggaggttcagcgaagtgtgggagggtacagggtgccctgcacacacttgcccctctcctaggcctgggctccagagccctctctgcacccctaccattcggtgggcgctgggggtcggcgttcctgctcctgctgggcctctgttgtctttgaacttctaggacgatgggccacttgggcaggtcccccaggtccccaccatcccagcagcccccagggtcctggaaccccgcattggcttgtggacaggtgtgtcttgaggcctcagggtccacacccaaccatgcgtcttccactgatgtttcctgggcttagagcagaaccaaccagccctgccctcaaggggcttacagttgtaactgggaggctaacgatggggggcaggggtgagcagcctccaggggtgggccacatggccccaggcaggaccttcactgtgagactccattgtctgcccactccagccattatcagggtttcaagtgagtggcctcatctgcaggtcatgccagccactccacaggcaggagaccccaggtgagggcacacagcccacaccccacccatgaggcttctattcacacccctaagccccaggaacactcaggcaacccatgacccctgcggtgaacacagacaaacctccagcagcgcccggcacagggctctgtcctctcttccttactctctatgaccctgtaaattctccaccgggtgcggtggctcacgcctggaatgccagcactttgagagaccagggtaggaggatcacttgaagctatcagttcaagaccagccggggcaacgta[137 bp omitted]gtggtgaaatcccgtctctactaaaaatacaagaaaaaattagccgggccaggtggtgggcacctgtaatcccagctactcagaaggctgaggcaggagaatcgcttgaatctgggaggtggaggttgcagtgagttgagatcgaacattgtacttcaacctgggcgac[226 bp omitted]ggggtaggagaatcgcttgaacccaggaggcggaggttgcagtgagccgagatcgtgccactgcactccagcctgggtgacaagagagaaactgtctcaaaaaaaaaaaaaattagcgggcgcagtggcctcacacctgtagtcccagctactcaggaggctaaggtggaagggtcgcttgagcccaggaggtcaaggctgcagtgagctgtgactgcaccactgcactccagcctgggtgacagagtgggaccctgtctcaaaaaaaaaaaaaaaaaaaggagttgtcattcccattctacagatgaaaaaatcaagactgggagaggaccgagaacagccggctcctgctcacagctaagaggcagcagacactttggggcatccataactcagccccttctttcttcaaacctgttcctcacctataaatgggggctcacctctacccttccctgacagcgcccaagaggatcagggggacagctcctcccagccccaaagatggacctcccaagcctgagggctatggagcaaagctcagcaggggacagacagcacccaggtgttgctgggagtgggtctctagcagggcaggaagaacacaacgggactctcagaggggccacggagccaggaactggggccttgcctcatagagggcaaagaacacagtctcccagaggacagatgagggcagaggtcacataaccgggggtgcacccacaacatggataccccaaggtaggtgagggccaaaaacaaggctgcagggccgggtgcagtgactcacgcctgtaaccccaacactttagggggctgagatgggaggactgcttgagcccaggagttcaagaccagcctgggcaatatagtgagacccctgtctgcataaaaaacaaattcaaaacttacccaggcatggtagtgcacgcctgtggtcccagctcttcgggaggccgaggcgggaggattgcttgcggccccgaggtcaaggctgcagagagctgtgatacaccccagcctgggcaacagagcgagatcctgtctctaaaaatagtgatagattgtctgggtgtggtggctgatgcctgtaatctcagcactttgggaggccaaggcagatgtatcacctgaggtcaggagttcaagaacagcctggtcgacatgatgaaaccctgtctctacgaacagtacaaaaattagccaggtgtggtggggggccgcctgtaatcccagctactcgggaggctgaggcaggagaattgcttgaactggagaggtggaggttacagtgagccaagattgtactactgcactccagcctgagtgacagtgagactccctctcaaataaataaaaacaatagtaaataacaaagatgcagcagaagagggggtaatatgtaaggacgtgtgtgtgtgtgtgtgtgtgtgtgtgtgtgtgtgcgtgcgcgcatgcactggaactgccatatcttcttgatttaagacagtcgggtctttgctttgtgatagttttaatagtacttttctgtagtactcaaacatttttttttaccatgtgtatttactacatgcctctgaatgtcaacaggcatctaagcaatgcaatgatgggccatttgtcctttcatttttaggcttttctgtatgaaaattcatcttctaaataaaactccccccaccccctgcccagtgtgggctggactgagggactcgctgccgcagaacagggcagggacaggagacgatggcaatgggccccgggacatccagtgaccccacctgcaccagggggccgaggtcaacatcaggggtgaagtcgtcagggtctcggcgacccctgctaggatgtgaggagaaaggggcctccaggagggtgtcctgccccaaaccctgtcacctca[138 bp omitted]tctgcctcccaggtttcagcgattctcctgcctcagcctcctaggtagctgggattacaggtgcccaccaccacaccgggcttttttttttttttttttggaaatagagtttcgctcttgttgtccaggctgcagtgcaatggcacaatctcggctcattgcaaactccctcctgggttcaagcaattctccagccttggcttcccgagtagccgcgattacaggcatataccaccatgcccagataatttttgtacttttactagaaacagggtttcatcatgttgaccgggctggtcttgaacccctgacctcaggtgatccacccacctcagcctcccaaagtgctaggattataggcgtgagccaccgcacccggccgatgaggggacgttttacagaacacttgagcaggcctcctcaagactgtcaaagtcattaaagacaaggaaagcctgaagaaccaagatagacttttaagagactcaagagacataaggatgaaatgccatgtgggaccctggatgggggccgggccaggaaaggaaaagactttgggggaaaacaggaagctggaacagagagcccggggtttcactgtcagagctgtacccatgttaatctcctggctttagccaggcatgatgactcacgcccgtaatcccagcacttccagaggccgagacaggtggatcacttcaggtcagaagttcgaaaccagcctggccaacatggtgaaaccccatctctactaaaaacacaaaaaaaattagccaggtttggtggtgggcgcctgtaatcccagctactcaggaggctgaggcaggaaaatcacttgatcccaggaggcggaggttgcagtgaaccaagatcacaccactgcactccagcctgtgtgaaagagtgaaactccagctcaataaaaaaagaaaatgttctggttttgacggggtgttaccacaagggaagccagtgaagggttgatgggattctctgcaccacccgtgcagctcttctgtagacctcaaactattccaaaataaaaaatgttttattattgtctttaagatgagatttcactgttgcccaggctggagtgcagtggagcaatcatagcttactgcagcctctacctcctgggctccagtgatcctcacacctcagcttcccaagtaactggaaccacaggtgcacaccgccacgcccggctaaattttttaaatttcattttctagagatagggtcttacttttgctgtccaggctgatctccaacttctgggctcaaacaatcctcctgctttggcctcccaaagtgctaggactacaggcgtgagccaccacacccaacccaagataaatactttttctttttttttttttttttttttgagacggagtctccctctgtcgccaggctggagtacagtggtgcaatctcggctcactgcaacctctgactctctggttcaagtgattctcctgcctcagcctcctgagtagctgggattacaggcacgtgccaccaaacccggctaattttgtatttttagtagagacggg[146 bp omitted]ggtgactggactgaataataataatgacaatggcagcacggcagcagctcacatttgcagcactgcttggagttgctttaaagtccactcctagaaaggcacccaggaaatactcctaagggccagggatggtggctcatgactgtaatcccagcactttggaaggccaaggcgggagaatcgcttaaggccaggagttcgagaccagcctgggcaacaaagcaagactgcatttctacacaaaatacaattagccaagtgtggtgacgtgtgcctgtcgtcccaggtaattgggaggctgaggtggaaagatcactcgagcctaggactgggaggttggggctgcagggagccatgatcacaccactacactccagcccaggtaacagggtgacagtctgacccaaaaaaaaagaaagaaaaaaagaaagattcctgattcctggcctggcgtggtggctcacgcctttaatcccagcactttgggaggcag[134 bp omitted]gaggcaggagaatcacttgaacccaggaggtggagattgctgtaagccaagattgcgccactgcactccggcctgggccacagagtgagactctgtctcaaaaaaaagaaaaaagaaagatccgtaaggaaagagtgcacagggttgtgcactgtactgctggtaacagaaaaaacagggaatggaccccagtatcagcggcggggtcacagagaccctgaggctgctggagaatcaggcagaaccgtcagtcctgctgcagagcctcacagatggggtggcaaaagcaagcttcacagtaaagcctgtgccccagacatggcctcaattctccgtgtgttgtcacctgtacccacaggctgtttattcacggatgacctttgccaacctgtggaagccacctccggacaggcctgcagggacccagggccgtagcaggagggactggacgggctgcggaggtggccatgaggcctgcagaggacgcactcagcggtctgtgccacccatttgagtatctgacggtgtgaccctgacctctcccggtgatcctgattgtcaacaaaaccctaaagtccccacccccccggggctggcgctcctgcaggacactgtggtctggtgatagcctttatttacattactgcaggtgttgcattatgtgaccaaaacgccgacccccaaagccactcagggtatatttctgtgttaaggcgttaaatcacttaccatggtccagtccaggggggccaccacgcacggtggggggcgggggggcagctgcaagctcctgggggacagaggacaaggttccaccagccaggtgggaaggtggggcagcagctgccaccctccaaccggaggacacagcgaggtcaccctgctggccgactgcaaggaagcccctgcgtggggtcctgcagggagcatctctggggtccacggcatccatgctaggagctgcttcagggacaccaaggcctcctccatcctgcacagggtgggcagcaggggcaggatccggctggcatttcctttcccgtgcgaatcccccaacccctgcacccccagcccctcctcagcaggactgcagggccagggccggggattttatctgcacagagtcgggaggggaccaggacccccaggcaccccgcttccttggcctcccaaagatgatgaaaagcttccataagagctttcccccttgaacagggtcagacaggtggcggtggtttttcgttgtttttttaagatggagtcttgctgtgttgcccaggctggagtgcagtggtgcaatcttggctcactgcaacctccgccccctgggttcaagcgattctcctgcctcagcctcccgagtagctgggactacaggcgcccgccaccatgccagctaatttttgtacttttttagtagagacagggtttcaccatgttggtcaggctggtctcgacctcctgacctcaggtcatccaccgcctcggcctcccagagtgctggcattacaggcgtgagccaccgcgcccagcctagtggtggggtttcagggcactctgctaacagccacaggcttcattcacataaagcaccccgcctgggcctgttccctccgtgaggctattggggagggcgggtcccagagtcgcgctcttatcctccacggacacacacactgcctgttctgagctccacttccggctgggtgctggggagagaataggctctggtctggcgggaggtgctcgctgtctggccgggcagatgtgtgtcccgggaccttatttctgagccacctgtgctgtcgtggctgggagacgccgagtgccgagggagcgcgggcctggccggggtctcggctacttctctcggtggggaagcagggacagtcaccccagcagcccagaatcgttgtgaagatcgacgtggcccgtggccggagcccggaaccgggagggaagtgggaccaggggcttgtgctggcccctgggccgctctgataccagttgggcgcccactggatggactcccagttaacaaggcggccctgcactcccaccttgatcctgacacccggactcagaggtggacaggcaggtgcctgccataggggaggaaagaggaggcgcctgctcccagaggccccacctcaggtcacggccaccacaggccaagaggacagaatcacagccaagcagggatggtctccatcctcttccagaaccccagagggccctcaggtcatgcagaacagagccagccgggtgggtcccaccagcttggcattaatgggacgacggatgaatgcagccacagcgtcataagagcttggtcagccgcccacacacacatgctgggaccccacgaatgccagtcggggctgacaggccactggtcccctggggagcagctggagggtgcacagccctgggcaccgccccagacctgacccactggaagggcctagcccacatctcaggcaagcctctgccacacccacagccatgctccagccactggccctggggagggtctgccctccccccgggctccgggtaccagagtgggcctaggccatagggtcacctggctggtgtctgtcccgtcacccagggccccgtgctggggtgtaccaggagcaggtgacacagggtggaccagagactcagcccccaggcgccctacccgggagaacgctgttgcagggcttgaacaagtgtgtcctggaaaatccacaaaatggagaacgggaagttggccctactcccaggtggcctggccccgggccataccaagtgggaggtggggagagcgcgcgtcctggaatagagtgctggcctcccctgtcgccacccctgcggggtcctcccgggtcccaagagcagggggtggtggggagaggccgagggtggaagttggcctgacagcctggagcctgaaggcccggactcggtttaccccatgtgagagggacaggcagagggaacacagtgtacgctgaaggcgtctgggagccctgccgaagcctcggtgctgagttcgcagcagcttgagaatggggctgcctgaaaccaaggccagcatcgcgcaccgtgaatatccacagcccgcagggagggaggggcggccccaaatacttcgatttccaaaatcctcttcatcacagtgtcttgtggaactagtaccacatggatcagatgaagtcgtcaactattttaagatgagaattttatctcagtttgatctgtaaatctaagaatctaagcaatctcaatgttttcaaagaagatcacggtgggagaaccagataaacttgcctgctgttcaggagaaaaaagaaacgtgcaaaataatgcaaggaggaggggcctccggacatgaggtcaggaagacaatggggttctggaaaactgggataagagtctagggacagacccaaatctacttgccataaagacagcacttcagtggggaaaagaatgcttttttgggaaataaagttgggacaatttgtggaaaaaaagttttgcttcctaccttactccttaccaggaatactttctaaaattagacataagcatttaaatatatggggaaaaaaaaaccccactacatttctagaagaaaatctcaaatgttttatgatcttacagcggagaagatattcctgagatgacacaaaaatgcaggagccgtaaagagaaaaaaactaatgaccagtaacaattttagatgcttagcttaaagaaaaaaatacaaacaaagtcaaagactaatgacagatagaaaaaagaaacacttccgggtcagccgagaaatggtattcagcaataaatgtgtcagagtcccaaaaaaaaaaaaaaaaaaaaaaaaaaaaaaacacttctactagacagaaagcgaattttcttaatctgtaaagtgcacctagaaaccaccaccatccacccaacagaaaaatgagccaagaagataaaatacaaatggcttttaaatagtcaaacgtttataataaacatattttccaatctcgaaacgactgtcagtggtaacaatgatcaacgtaacatagatgtaacaggaacatcacgacgttcgactatacttacaggaaacacaagctacagtgaaatactatctcacgcctaccaggtctgcaaaatccagcttgggcaagggtgtcgccggccccctcttatgctggtgggggagggcgatttggtaccacccctttaggggcctaaatacagccctcgcacttctgcaccaaggaatttaacctaagaaaatagtccgacttgggcaaaaaacggtttgtacaagcaatagtcaagctagcattgttcgttataaaagacagcaaaaaccctaaatttctacaggaaaggggataaagtctggtgctataaaactccgtttccggaggaatcccacctgtatctgaatgcatggggcgctctccgagctacgttaagtataagagccccaagtaaagtaactgaccttttgcagaaacgcacgtagatgttcctgcatagactttctttgcagacccgtaagaaacgggtttccctctgccccaggggagaactgggccttggaggttaggactgggaaaaacacatcaagtcttcaccaaataccctttcaggctccttgaattttctactctgtgcacctgaacacacttttgttctcttgcaagcagttgctttgcactggaggcaatgaagacacggcggagtcccagctcgcagggagctcaggttctgacggcgtcagaggacaacacgctctggaccagcgcagcgcccaagggtcagcggcagcagcgagcagggggcacgggatgcggggaggctcttcgggaggcatgaaaggcagacgtgttccgaaacgtgagccgcgctgaggggcacggcgcacgaccggggacagaaggaagacactgcggtcgcaaagccctggccgtgcaaaggccccgtggtcagccaggagcccaggcgtcccctgctctagcgaggtttccttccgaacgtcccgtagcaccgcttaccatggaacggcgggcgctgcctcgcagccccgaccccgcggcggcccccacgggcctacgaggaactcgaggccgagggaaggagtgagagcggccggaaaggggcagggccgagccggaccggtacctggctgggtcccagcggccgccacttaccaccgaggccgcctcttcgtccacagcctgacgccagccaccgccgccgccgtctccactgccgcacgcacgccgccacttccgcttccgtccgtgctgcggccccgcacgtgacgcagcgccttctcgcgcccagactgaagcaccgcccccccttaaaggggccgcggactagagctagctggatgcagcttgggatcccggcctcgccaccgcctggtcgcgcgacacaggctgaaccctgcccaaccctaaggtggacaacaggccaccggttcccgagtcctcccggtcctaagccttctgccctagagatcgtaggaactcttctcgtgatcccagctccagtgtcggctccctcttccaggggagaccctcggggcccaagcacctgccaccgccctctgctggaccccagcttcgccatctacgaaggaagcggcctgtccgagctctgaggtccgtcaagcgcggcacctcaggacccagagtgcgctgtcctggcccctctgcagtaggactgacgggaagctgtcgagggggcagtcccgcgatggcagcagggcccccacgcctggcgtcctcatcgcgcccacccagcagggctcaccagcctccctaggaagcaggcaggggtcctgggctcaaacgctgccccacccatcatcgcccaggcaaccagctccctaagggctccccggactagacagagacccaccccacttccgcagagtaaaacctataagggggtccgtgccgatctctcctagggactcagggacgaaacctgggaaccccggccccctttcgagctcgctgagcgctcgagagagtgagcagagccatgaaaggaaggagagcagccctaaaattttaaatctttaatttccgttttcacgtattttcttcttgcttccaaaaggaaaggagtgcgtagctctgttgcctgtacatcgtccacagcccctgggtcggggcggggtcccctgggccgcccggggggtccacatgcagcccctgggtgggggccggcgcggggtgaggtccgggggccgccttattgctgaggtccggccggttggggccgccgctaggcgcgctggctgggcagctcctgggagatgaagcgacgcaggcgctccaggtactggctgtagagctcgatgtcgttgtgcccggcgccctccacccacagcggctccaccgccttggggcagcgctcgtagagcgccagcccgtgcgagaagtcgatcacctcgtcctccgtgccgtggatgatgagcacgggagacgtgatcttggacaccttctcgatgctgcgggagggtcgtggagccggtgagacttcgcgcccggcccgggccccgccccgcccccgtccccgcccgggccgctcacttagggaaggcgtcgaagcagtaggtcttcttggtgtcggggaaggcgacgcgcatgcccgaggtgagcggcgagtgcagcaccaccgcggcacactcgtagcgcgaggccaggtccacggtgggcaccgtgccgatgctctgcccgtacaggatgatgctgtccgggctgatgccgtacctggcggcgccggagcagggtcagccgcggcctccgacgcgcgcgcacccttcccaccagcgggcgtccccgggcccagctccggatgcgaccctccagtctccccactcagccaagtcagtgggtcaggctcaggctccacaccagtcccgagggccacccccagcccccaacaccgtggcggtgggcgaagccagcggccccgccccgttccctgcgctgccgttcactggcgtttcctagctaggatctgcagggatcctgcctacggagtgcccctggggcgggggtaagggaggccctggcgcctctcctcctcctggtcacccctaggtgcacactgggaactgtgtggcccccacatcctgaatgcttcacaccttcctgccagggttagaaaaccgttcctggtgcactggccaggacagcggacactattcctccctgcagcccttgcccacccccttggccatgaggaattcaggcagctgtgtccccaaatgtctccacccaattttggactctcggagtccccacgcccaatgagatgccagtgcaacccaggtcagcatcgagggtggtggctgcggaggtggcaccccctcccaccagcaccttcccttgggagtggacaagtcctcggccacctcagcaccaccagctcccacccaggggcaccctcacccccaggtcattggtgtgcggcccctgacccagctgatccagcaccagttacaaggcctcctcgtgcccagtcccaagcacacgggacccacctgccaccctgcccatgccgggaccccacaactctcctcccacacgctctaggctctgatcccaggcagacgccctcttgcaaggcaggagcatgggcaggtgtgcgtcccctctgcctggcatctccaccagcagggctgtccccgtccctggcctggaatcccagcctcctggcagcactccacagctcgccactcacccatgccccaaaggatgctgcctggctggtgcctgtggctccagctctgcctcggcctccctggcctgctccctggcagccatggtcagtagtgtgctgagccagcccagccctgccacctgctacaggcaggagccccgagctgccacctggatgtcaccactcaaacgaacaggacacatccccggtggaggccctgggcacgctctggcctccccctcacagctctgggcctaggttcctgcaggacaaagtggcagcaggacagatggccgagcagacagagctcagagctggccatggcaggtgtgactctgccagtggcccaggcagtagagacaggaggggccgaggaagtcgcatgaagtggtgattggtgtcagcgtcccacactgctgggaggcccccagagccagggtggtgccaggggaccagctcccaggcccactgcagggactgcctgcatatcaccaaggcaacgacgaccccacctccctagggcctctgacttctcagagctgtgcctggtccctgtgggagcaggtcagaccagtgggctgggcagggccaggacgagacaggcccagtggatggtgagcaggaaaagccaccagaggcccacccgggtctcctcgtccaaagcagcactggcccgggcggtgctcaaacaccggtgaagggcccaggcaagcgcagggctggggacgtggatgactaggagggctggatctggaatcgaggctggcccagacctcggatgtgtgctgcgggtctgcaccttaccctgtaggccctgccccaggatggccaagctccgcagccacagggcctcatgggccagtcctccggacctggatgcagcagcctcgcctcacttggccccaagtgctgcctcggccgatgggctcccagccacacgtgcacagacccccagaccaccacccactccctcccgccgggtggcatccacacccctgtgacaagctcagccccttcccatcctcaggccaggggttcccagggaacctggctccacaggccagggtgtgggaggaccgcctggccacacctcagccatgtggaggcggcacctgcacacccaagctcgcctgtccggctctctggccctgtgcatccactgtggctcccctcctgcagggccgcccaccttcctcccagggaagcccgccccccggccccccgcctggtcccctcttgggtgtgcccaggctgagctgcccccagggtcgccctcacctggtgcgcagggcctgccaggcggcgtcgatgtcggcatagaggttcctctcggaaggcctgcccgagctggcaccgtagccggagtagtcgtaggagaagatgttgcagtggaggcgggagcccaggccaatgtagaagctgctcatctggcccaggtccacggcattgccgtgcgagaagaggaccgtgtacctgggacaggccgagaagggccgttcacatcctcgctcccagcgcccagctgcagggcaggaggatgcgtagtgacagcccaccccggtggccagccatgcccagtgcctcatttactcccctcccaagggggccagaagccagtgaatggagaggggaggctacgacagcacagctccatctccgagggttccccatggggagaggacaggacagctggcagggggacaggcagcctgggctgcagaggccagccagggagcctcaggattcccatctgtgaagcgggacactgggaccatcggtcgcatcctctctcagggcagactcgcagtgtgtgctcagatactgcaggcttcactgcccttcctcctggaagaacctggacccccggggatggagcgcacaggcccacctttcaggaccttcccaggggagcccatgctgctgctggcagggctatctcccctcacctcacagaatggtgccctcactgttggggcacaactggaccccacccctgcccccaacaagcaaatgcggccaatctctgctcacactcatgcagcccctcctggcccaccaccctgcccaagccccaaggctgtgctgcaaggcctgtctgcttcccagcacgggagctgccccaggtggtgccaggagcaggtggccaggctggccctgccatggactgcttcctccagttcccccaggcccccacctagcccagccagaaggtaaaggctcgccctctggactcagatctggtcagaaccccacctggcgagaaggtggatgtacccgcaggccagggcagcccctgtgccccagctcttgcccagcaggcaaccaccaggcgctgggttgttggagtcgcccagcctgcccacccatgccagctggggatggcctccctgagcctggtgtccttgtctgcgagagaaaattgccagagggacgaggccggcctgacgggggataccacccttgctggctggatggcccttcacggcaggctcgggccctcgggggcaccaccaaccacaccaagcaccgcaggcagaaacgggagccccaagaacagggtgacccagcccaggcgcggccacagctgctcacctggcaccaggcacgcagcgaacatacatgcaggagacgcggttgccgcgggcgctcttggtggggaagacctcgatggtgtccagctcgcgctggctgtactggaagtcggcacgctccgtcaggtgcagcttccagcgcccgggtgcgcccgaggaggctctcagggtccccaagggggcggccccggccccaccaggccccggctcgggctcaggcaccagggagtaggtggcctccggcggcaggaaggcgagcttggcagcgatgcggccggggcagggcgggcagcagaagaggcagcagagctcactcagcgacagcccattcatggcgggcgccgcccaggccgggcctccaccggggcccccgccaacaacgccgcccggcctggcccggcaggggaggggtgggggtgctccgagtcgcgggcaggggggagagcgcccccccagctaccgccccagacagcagccccgttaggaggccagggcccagccccatcgcggtccaagccgagccccagggagcctcgcaaccacaggtctccatgtcgtgccgtgggaagccctgcgggggaacagtgacatgtggggtcctttgggggtgccacagtccagctgggcacccccgggaggcggggcatccacccgtgccagggggcggcatgggcccggggcctgtcagtccccatcccctcggccctccccacggcctgtcaggcactgcaccctacagctcaggggaccccaattcagccccctctccacaggatgaaggaacccccaccttccctgagctggcgatcaccacctcttgccatgtgagtacagccatggcatgcggggcatgcaggggatatgaccccagccccgcccacacccccgaaacgcccggctccagcaccagggaaaccccatgcgccaggactcggtccgcactgctgcccactccctcccccggcccatctctgccaccctatgggtgacgggccgctgaggcaaggacagagctcgaactgaagggacccacgagggacccgaacaggccccgctacgtgagcgtgcacaggcgccgggtcccaccggcctgcgatgtctggagacagaggaaatacaacaaacaaaggctctagaaacaaaggcaggatacatcccaggctcctagggcccccagagcagcaacaatggctcttctctgtgctggagccaggcctgctgaggggcaggggaggtgggctggcgtcagggggtccttctccacccctgacttagggttccgtgaccgtgggcgagtcccttgccctcctgaggcctcagcattctcatctataagtgcagacaccacacaccccacaggaagtcaagtgaggggggaggggaacgaaggtgcctgattgagagtggaaactcggaccttcttccttgctgcagaacgtcatgaaacacattaagtcgacaacagctaagttgctaaagcaaccacaatagtgtaaggacctgccaacagacagacgtgaagaaaacacgaaggtctgagacgtctatctaccgaccacgcttctccttcagactggagcgaggagagagacacgctcacaactcaatttcagcagaacaccctggaatgcttggcttttgggtcacagcatgagaaaaccgtggggccaggaagatgaggctcaaaggcagatgtggacacagatggacatgcaggcagctgcaggcgccacagacacggctcgtggggacaccctcactaccaaggagcagcctcaggcccagaaacacacctgctccctcaggacctgatgtgagacccacgttcctgtgagccggactcatgggcacacgaggaggagaggagagagctctgaaagccagggtggggcaaggatggcatcccagtgcccccagactcccaggcggaaggcaaatcgcacatgcaagcacttttcagccgggaggtggactgtcaggctggttctgcttctcagatggaggcgagtctccctcctggagacacctgtcaatgtctggacacagttttgggtgtcaccactggggactgggtggaggctgcttagcaccctgcagtgcccaggacagacccaccccaaagaatgatcaggcccaacatccacagcgtcgaggttgatgtcagcttttcaacatattctcaaagaggtccaggccctaccggtgctgccccgctggtgctggggacttggagggccctgcagtttaggtggcatcatgcagctgggtcctgagagcccagtggacagcagcaggcccctggagaccccggagacgaaggggcacaccgaggtggccagggccccactatccaggccagaaacaaagatgttatccttgacacctccttccacccactggatctgagccggtccatcaccagcccggtggctctgcctgtctcccatcagccaccgcccggtccctgcctccatcacctttcaccagagccacagcaacagcctccctccttgctgatcacctgctccaggacattctcccccagcagccaaacaatctttcacgacacaaatgcaatggagccgcttccctcttggggtgtcctgggggcctcccattattccctggatagagatcaaagccctccccacagcctgccaggtccgcattccggctcaggccgacctctccagactcactcatctcacaccctgccactcctggctccctcaagacaagccaaattgccccttcctgcctctgctcctctgccaggaactcccttccccaacctcactagacagccttgcccaacccaaccaccctttgcacctcactgccaacgctctcagagtcctcaaagctgggacaggaccccttacacgctctttccacagcttgtatttttcacacgtttggccagatctccccccacctccaaaccagaaactctatgagagcaggaccatgacctgccactcactaaaggaatgggcaggtggtaggcagcacagaattaaggaggaagcacaggaggaaaagaatccccaaggtccgccagctttgacagggaagggaaagtctagtctcctctcctctccagccacaggtacctggaacctccctagtgtcactaatgggcgtggactggggagtgcaaacccagacgcctcactcactgggcacacacccttgacaccctgaatcccaccaattccgttcccacgcacttaactgggcaaccctctgcaagctagaggtgttctgaggaccagcaagcaaccgagcagccaaaatactggaagatgacctacatatgggagacggtgactgcacctcactcaaccagtcagggtgggaaacccgcctggggggaggcgcggccatatcagagggcagacaaacgggccaggtgacagggggatgggacagagggacaagcaggagcaaaatccgaggtgacagagcaggctcctggctagagcagaccctgggaggaagaagtgagcagaagggtcctaagagagagcctgggacgggtgaggtcgcgcccccgagagtttgcacttcatcctgggagaaatggcggggccgcgaagaagtcccgagcaagcgatggacaacataggagaagggctgcatcccggagaacggacgcgagcggaggccgggaagcccgcccaggagtcagggtggcaggaagaagcctgacaagggaaacagcgactgggagctggttgggaagcagggctcgggagggcccctgggagctgccttggggggcgagaggccgaagcgtttgtcggactgggggcagtttcggggcaaaagagcggaatccgcggctcggacgggtgctccccgaaggcaagggccgcgtccgcaggagggtgggagcgcaacccacgccggagggctgaatggatggggacagggctttcccaatcacagacgctcatccgcggtccgcgcccctgctctgggctcctcgggcaggacccgcggaagccctgggactgcaggggtctcggggacgtccaaccgggctgtcaggccctcgaggcccggcccgggaccccgcgcggccgcgcccgcccccgcccctgcccggcactcaccaccccggcccgcgcccccgggccccagggccgcgctccatggctcccggccgcccgcccgtgcgtccgtcggtccctccgcacccctgcccggcctcctgcaccgccaccgccgcagctccccccacggacggaagtgagcctcgttctcaccaccgccccggaagtgacgcgaggagcgcgcggggcgggggtctgcaggcacagagcgaccgcgcgactagcgtcctgggggcggggctgatatgtcgaggggcgtggcctgctgctctgtgggcggggccaaacttaggtttcattcacttggggacccggaataggttgaggccagtaaagttctcgcctggaaaacaaaatttacagggacgccaaaaaaaactcagacatcaacatttagaaatgttttaaaatatttttctttatgagatggagtcgcgctctgtcgcccaggctggagtacaatggcgcgatctcagctcactgcaacttctgcctcctgggatcaagcgattctcctgcctcagcctcctgagtagctgggattaccggcgcccaccaccatgcccagctaatttttgtgttttcagtagagacggggtttccccatgttggccagtgtggcctcgaactcctgaccccagaatcctcctgcctcagcctcccaaagtgttgggattacaggcatcagccaccgcacctggcctcttttttttaacatagagtctactctgtcacccaggctggtgccatcatagctcactgcagcctcgacctcccaggatcaagtgaacctcctacttcagcctcctgagtagctaggactataggcacaagccaccatgaccagcttatttaaagtctttatatattgctcatcagaaattcttttgcattagtttttaaaatattacattaggccgggcacggtggctcatgcctgtaatcccagcactttgggagactgaaacaggtagatcacctgaagtcaggagtttgagaccaagcctgaccaacgtggtgaaaccctgtctctactaaaaatacaaatattagccgggcatggtggcacgcgcctgtagtcccagctactccggaggctgaggcaggagaatcgcttgaacccgggaggcgaaggttgcagtgagccaagatcgggccactgtgctccagcccaagtgacagagcaagaagactgtctcagataaataaataaataaataaataaataaataaataaataaataaaactatgatcactccactgcattccagcctgggcgagagagcaagatcctgtctcttaaaaaaatttcattatgggctgggcgcggtggctcacgcctataatcccagcactttgggaggccgagtcgggcagatcatgaggttaggagatcaagaccatcctggctaacacggtgaaacctcatctctac[139 bp omitted]gggcgacagagcgagactccgtctcaaaaaaaaaaaaaattgcattatggcagggcctagtggctcacgcctgtaatctcagcactttgggagaacgaggcaggcagatcacctgaagttaggagttcagcctggccaacatggtgaaatcctgtctctactaaaaatacaaaaattaggccaccctggccaacatggtgaaaccccatctctactaaaaata[131 bp omitted]gttactggagaatctcagagcgtggtcagggcaggcctttctaaggaagtgacagggacaggggcagaaagggctgcagacaccaaaggggcccagcctggaagtgtgagtgtgaattggtgggaagccttgcttttcaggccttctctcatatgtgccttccccccagctttcgtgccttttccagctcaaaatgctcctccagcctgcaggcaaccgcagcccccgctccgtcccagggactctcatcttagctccactgttctgagataagcctgaggctcctgggccaatcctgcccccaggggctcattcctcaaattcaggacacagctgccagggaaggaatcaggctcaaaagactagagacttagagatagcccagggtttctttgcctcattttctttcctctttttttttttggttgttgttgttttgagacagagtcttattctgtcacccatgttggagtgcagtggcgcgatctcggctcactgcaacctccacctctcagattcaagctattcttctgcctcagcctcccgagtagctgagctaacaggcacccgccactgcacccggctaatttttgtatttttagtagagatggggtttc[137 bp omitted]ggacctctggcgcccctgctcaggactcagctgcctgggtctccctggggctgtcaagagctgccccagcgttcccctgcctctgctgtccccctcgaggctcccagcctccgctgaggttctcctgaggtccaaaggccaaaacaagtccaggcttcttcctaggtccttgtgaattctctgagcaccagggccagaagaggcctgtccccagcctccttcccccctcccatcttccctgcagccccttcccactgtgagctaggcaggaccagggctggaccgcaccagaaagcccagctccacttgtaaacgacagcccccacagggacacagggagacaccatccaaggggaggaggataagcccgcagggtggcccaccaatccaaggccacctggtgaaaggtaaacgcacgctgtaaacactcaaatgtctcagaaggacacccatcccttcctcctccccagagaccctttgtgatcgagcctctgtcccaattgtcccagaaaatagtgggtgctgtggctcatgtctgaaccccagcattttgggaggccaaggtgggaggattctttgaggccaggagttcaaggctgcagtgaggtgtgattgcaccactgcactccagcctggatgacagagggagatgctgactctaaaaaataaaaatgagggctgggcatggtggctcacgcctgtaatctcagcactttggaggctgaggctggaggatcacttgaagtcaggagttaaagaccggcctggccaacgtggtgaaaccccatcttttttacgttgttgtttcttttttgaaatgttgtctctcactgttgcccaggttgaagtgcaggggggtgatcttggctcactgcaacctccgtctcccgggttcaagcaattctctgcttcagcctcccgagtaactgggattataggcgcctatcaccacatccagctaatttttgtattcttagtagagatggggtttcaccatcttggccaggctggtcttgaactcctgacctcgtgatccactcgccttggcctcccaaaatgctgggattacaggcgtgagccaccgtgcctggccgatgaaaccccatctctactaaaaatacaaaaattatctgggcatggtggcagatgcctgtaatcccagctactctggaggctgaggcaggagactcacttgaacccaggaggcagacgttgaagtgagtcgagattgtgccactgcacttcagccagggcgacaaagtgagacttggtctaaaaataaaataaaataaaataaaaaatgaaaatgaggccaggtgctgaggttcacacctgtcatcccagcacttcgagaggccaagccgagtgcatcacttgaggtcaggagttcaagatcaggctggtcaacatggagaaactccatttctactaaaaatacaaaaattagctgggtgtagtggttcaagcctgtaaccccagctactcaggaggctgaggcaagagaactgcttgagccagggcggcagaggtcacagtgagccgagatcacagcgttgcactccagcctgggcgacagagcaagactctgacttcaaaaaaataaaataataaaaaataagtccgggcgccgtggctcacgcctgtaatcctagaactttgggagcccgaggcgggcggatcacgaggtcaggagatagagaccatcctggctaacacggtaaaaccctgtttctactaaaaatacaaaaaattagccgggcgtggtggcgggcacctggagtcccagctactcgggaggttgaggcaggagaatggcgtgaacccgggaggcggagcttgcagtgagctgagatggcgccactgcactccagcctgggtgaaaatgcgagactctgtctcaaaaacaaataaaaataaaaataaaaataaaaataaataaataaaaaaaaatgaaaaaaatcatacattgaaaatggggggagccactagtccctcttccccttcatggtctgccccagccatgctggcctggccaggagtgctgctgcctcagggcctttgcaggtactatggctcctgcctgcagggcccttccccatatggccccctggcttccttctccagcatcctctggctctacaggagggccacaacatccaagagcttctgctaaccaccccagctaaatcccaaccacatacatacacctctaccccattacctctatcccatcaccctgtttatttccactgcaatacttaccactctcagattctcttttttttgagacaagagtctcactctgttacccaggctggagtgcagtgactcgatcttggcccacagcagcctccacctcccaagttcaagtgattctcctgcctcagcctgccgagtagctgggaccaaaggcgtgcaccaccatgcccagctaatttttgtattttttgtagagatgggatttcatcatgttggccaggctggtctcaaactctcaggctcaagcaatcctcccatctcggcctttcaaagtgctaagattacaggcgtgagccaccatgcctggcaattgttgggttttattctgttttgttttttgaaatgaagtttcactcttgttgcccatgctggagtgcaatggcacgatctcagctcactgcaacctctgcctcccgggttcaagcgattctcctgggttcaagcg[133 bp omitted]cggccccccaaagtggtgggattacaggggtgagccaccatgcctgcccaattgttgttttttttttttttagttttatttatgtttatgggaaatacatctgcaagatgtggtggttactctttttttttttttga[134 bp omitted]cacgcctggctaattttttaaatttttagtagagatggggtttcact[140 bp omitted]ccaggctatagtgcagtggtgcaatctcagctcactgcaacctccgccttctggtttcaagtgattctcctgcctcagcctcccaagtctctgggattacaggcccctgccaccataaccagctaattttttttgtatttttagtagagatggggtttcaccatgttcatcaggctggtctcgaactgctgacctcgtgatccacccatctcagcctcccaaagtgctgggattgcaggcatgagccactgctcctggccaatggttactcttatgtgtcaccttgactgggctaccatatatatagctggcacaacatcatttctgagtatttctgtaagaatgtttccgaagagattaacatttgaatcagtggagtggctatacccagttaattttcaatttttttgtagagatgaggtcatgctatgttgcccaggctggtctccaactcttggcctcaagcaatcctcccacctcagtcttctaaagtgctgggattacagacatgagccaccatgcccggctaatttttgtatttttttttttttttgagacgaagtttcgctcttgttgcccaggctggagcacaatggtgcgatctcagctcactgcaacctccacctcccgggtacaagcaatcctcctgcctcagcctcccgcgtaccttggattacaggtgactgccaccacccctggctaatttttgtatatttagtagagacggggtttcatcatg[139 bp omitted]gggccccaggagctgacctgccgtctccatgctcagtcccctcttgacggacatgtagggtgtttctggctttggctgcaacaataatggcacatgagacgtttcacactgatggataggaccctgcagggaggattcctggaagaggaggtcccatgagaaggtccatgctgctgtgttcagaaagcaatcctgggtctccccctgagaaaaccccccacagagggaccgagatagatgatgtgggagaacaaggtactgggtgactttttttttttttttttttgagtaggagtctcactctgtcatccaggctggagtgcagtgatgtaatcttagtttactgcaaactccgcctcccgagtccaagcaattctcctgcctcagcctcccgagtagctgggattacaggtgcccgccaccacgcccagctaatttttgtatttttaat[132 bp omitted]gtagagacagggtttcaccatgttgggcaggctggtctagaactcctgacctccagtgatgtggctctcttggcctcccaaagtg[160 bp omitted]taaataagctttgtgattaaatactaatatttatacttttcagcatatacttacaagaatgggactgggcgcggtggctcatacctgtacttccagcactttgagaggccgaggcgggcagatcacgaggtcaagagttcgagaccatcctggtcaagatcgtaaaaccccatctctactaaaaatacaaaaactagctgggcgtggtggtgcgcacctgtagacccagctgctcaggaggctgaggcaggataatcgcctgaacccgggaggcggaggttgcagtgagccgagattgtgccaatgcactctagcctgggcgacagaacgagactccgtctcaaaaaaataatggaaaacagggatttccatagatatttgcacacctatgtcagtagtaccttgattcccaacagccacaaggtagcaacagtcccagtggctatggacagatgactgggtgaacacagcatggcctatacacacgctggaataggaggcagccatgaaaaggagcgaggccgggcatggtggctcacacttgtaatcccagcactttgggagaccgaggcaggtggatcacgaggtcaggagattgagaccatcctggctaacacggtgaaaccccatctctaccaaaaatacaaaaaattagccaggcgtggtggcgggcgcctgtagtcccacctactggggaggctgaggcaggagaatggtgtgaacccgggaggcggagcttgcagtgaaccgatatcgcgccaccacactccagcctgggagacagagcgagactccgtctcaaaaaaaaatatataatataatataaaaaaagaaaaaagaaaaaaagaaaaggagcgaggctctgactcaggccacaacgcgcggatgcactttgaggacgttacactcagcgggaggcgccagacacaaaaggacacgtcttgtgtgatccactcctaggaggtccctcgagtcctcagattcacagagacacaaagtaggatggaggccgccaggagctggggaggggaatggggagtgagcgtttcatggggccaagtttcagtttgcaaagatcagaaagttctggaggtgatggtcgcacaaccgtgtgaa[224 bp omitted]gagg[138 bp omitted]ctttatattatgcgtattttaccacaaccaaataaatcaatgttcataaaaccacggagttagacgagctgtttggttagcgccagcttcgcaggcagaggcctcaggggtccgctggggacccacactcagaggaatctaggcatgatataatgctctgtggttgctgtctcaaaattcctaaaaattggctgggtgcggtggctcactcctgtaatcccatcactttgggaggcccaggcgggcggatcagctgaggtcaggagttcgagaccagcctgaccaacatggtgaaaccttgtctctactgaaaaaacaaaaattagctgggcgtggtggcgcatgcctgtagacccagctacttgggaacctgaggcaggagaattgcttgaactcaggaggcggaggttgcagtaagctgagatcatgtcactacactccagcctgggcgagagagcaagactccgtctctttaaaaa[133 bp omitted]accccgtctctactaaaaacacaaaatcagccgggcgtggaggcacatgcctgtaatcgcagctacttgggaggctgaggcaggagaatcgcttgaacccaggaggcagaggttgtcgtgactcgagatagcaccattgtattccgactgggcaacaagagcaaaaaaactgtcttagaaaaaaaaaaattctaaacatttttaaacaaggggccctgtattgtcattctgagcttggcctcaaagattctgtagccaggcttcttttggggaaaggaccgggaggcctccttccagggtcaggggcgttaagcgctgcggagggatacccctcccagaggggagagagtggaacccgctcaggaagtgggttcctgacatgagaaggaaggaagttggcgggggcatcttaaaatagcatcacccaaccacgcggtcagaggtgcggggagggagcagggccagggccggggaccctcccagcgaccttccctgcaggcacccagccccgtcccctcgacacaccagacccagcaccctctgctcccaccagcccaccaggaattgggttatttaagttatttatttatttccttattttctttttcttttgagatagagtctcactttgtcacccaggctggagtgcagtggcgtgatctcggctcactgcaacctccaccgcctgggatcacgcgactcttctgccacagccttctgagtagctgggattacaggcgcccgccaccaagcctggctaatttttgtatttttagtagatacagggtttcacca[140 bp omitted]gcccaggctggggtgcagaggcacaatctcggctcactgcaacctccgcctcccaggttcaagcgattcttctgcctcagcctcccaagtagctgggattacaggtgcccgccaaccacacctggctaatttttgtatttttagtagagacaggatttca[131 bp omitted]gattggatttgggcgcaccctcaggacgtcatttgaacctaataatctctttaaaaagtcctgtctcggcgggggccaagcacagtggctcaagcttgtaatccaaatactttgagaggccaaggcaggaggatcactggtgcccaggagtttgagactagcgtgggcaacacagcaagaccccatctctacaaaaaaaaaaaaaaatatttggttagccaggtgtcggggcacatgcctgtggtctgagctactccggagcccaatgtgggaggatcccctgagcccaggagtttgaggctgtggtgagccgtgatcagctcccactgcactccagcctgggccacagagagagacttcctatctccacgccaagtgccttaggtcacgcctataatcccagcagtttggcaggcagagtgggaggat[215 bp omitted]gaggcaggagaatggcgtgaacccgggaggtggagcttgcagtgagctgagatcacgcctctgcactccagcctggaccacagagcgagactctgtctcaaaaaaataaaaaaaaaatagccgggggtggtgtcgggaagctgaggcaggagaatggcgtgaacgcaggaggcggagcttgcagtgagccaagatcatgccactgcactcctaggcgacagagcgagactccatctcaaaaaaaaaaaaaaaaaaaaaaaaaaaaaaaaagaccagcctgggcaactaagagagacctctgtctctgcaaaaaaaaaaaaaaaattttttttttgagacggagtctggcactgtcacccaggctggaatgcattggcgtgatctcagggttcacgccattctcctgcctcagccccccggatagctggattacaggcgcccaccaccacacccggc[180 bp omitted]tccgcactgctgatgagggagtgtgattgttctctgttaccagcactgtctcccgcccaccggagccgagtgtggtgggtgtggaccttctgggaaagggtgtaaacacgtgcttagatccggccggaagccccgtgaccggggtgcagctgcctttggtcagtaggtggcaaccgtgtccgcttgattttgggagggtccgagaggctggtgcagggctcccaggagaggcgggggcgatcccacttgccttgccaggataacagcaacaagggctgcccacgtgcatgctgggcaatagggataccgcagagaatgaaagtccagccctagcagggcagcaagacctcgactctacaaaaatttcaaccacaacaaaaattagctgggcgtgacggaacacatctgtggtcccagctacatgggaggctgaggtgggaggatcgcttgagcccgggtggcaaaggccacagtgagctatgactgcacaactgcactccagcctgggtgacagaggcagatcttgtctcaaaaaaaaaaaaaaaaacaaaaaacaaaacaaaaacaccaaggccaggcacggtggctcatgcctgtaatcctagcactttaggtggctgaggcgggaggatcacctgagatcaggagttccagaccagcctggccatcacagcgaactcccatctctactaaaaatccaaaaattagccaggtgtggtggcaggcacctgtaattgcaactactcaggaggctgaggcacaagaatcgcttgaacccgggaggcgaaggttgcagtgaaccgagatgtcactgcactccagcctgggggacagagtgagactccatctcaaaaacaaaacaaaaaacaccaaaacgtcctgtcctggtggaggtgaaataaatgagacatccttggccgggcgctgtggctcacgcctgtaattccaacaatttgggaggccaggcgggtggatcatgaggtgagaccgagaccatcctggctaacatggtgaaaccccgtctatactaaaaatacaaaagttagctaggcgtggtggcaggcatctgtaatcccagctacttgggaggctgaggcatgagaatcgcttgaacccgggaagcacaggtagcagtgagctgagatcgtgccactgcactccagcctgggagacagagcgagactccgtctcgaaaaaatatatgtatagccaggcgtggtggctcacgcctgtaattccagcactttgggaggccgaggcgggcggatcgctaggtcaggagatcaagaccatcctggctaatgtggtgaaaccccatctctactaaaactataaaacaattagccgggcgtggtggcgggcacctgcagtcccagctactcaggaggctgaggcaggagaatcgcttgaacctgggaggcggaggttgcactgagccaagattatgccactgcactccagcctgggtgacagagcgagagtccgtctcaaaacaaacaaacaaacaaatcagaaagttaatgggatgctgacgcaaagaaacaagctgaacaaggtggtgacagggaagttgatactgattttggcctcagccatgtggaaacagacagagggtcttgcggggaactcctctccttttttggacgcattcctgttttgttttgttttgttttgtttttttaactttcttaatttttttcagttttcgtcacactttgtctaatactatttcttttttgtttttgagacagagtttcgctcttgttgcccaggctggagtacagtggcacaatctcagctcactgcatcctctgcctcccaggttcaagtgattctcctgcctcagcctcccgagtagctgggactacaggtgcccgccaccacgcccggctaattttgtatttttagtagagacagg[131 bp omitted]attgtttcttagccaggccctgtggctcatgcctataatcttaggactttgattttttgtttttgtttttgtttttgagacggagtttccctcttgttgcccaggctggagtgcaatggtgcaatcttggctcactgcaacctctgcctcctgggttcaagcgattctcctgcctcagcctcctgagtagctgggactacaggcatgcgccaccacacctggctaatttttcgtatttctagtagagacggggtttcaccatgttagtcatgttggtctcgaactcttgacctcaggtgatccacccgcctcagccttccgaagtgttggcattacaggcgtgagccactgtgctggctttttttttttttttttctgcgacggagtctcgctctgtcacccaggctggagtgcagtggcgccatctccgctcagtgcaagctccgcctcccgggttcacgccattctcctgcctcagcctcccgagtagctggaactacaggcgcccgccaccacgcccggctaatctttttattttttttagtagagatggggtttcagcgtgttagccaggatggtctcaatctcctgacctcatgatccacccacctcggcctctgtacttttttcctattggctggggtcgggtcacacaatctaaactaactttggttggctaaacatttgattttttttagatagggtgggtatgtaaaagaaaggggaggccggg[175 bp omitted]gaggcaggagaatggcgtgaatccgggag[132 bp omitted]tagaaagttagtctttttttaaaataaggaaaggaatgtaagctgatgctgataacgcttggtattgaggcgtgtctaggcatttaacaaaggcaaaaaggaaaaagaaaaagaagggaaaggaggggtactatgaattaaagaataaatgattgatcagattattt[150 bp omitted]tttttagagtctcgctctgtcacacaggctggagtgcagtggcgtgatctcagctcaccgcaacctccacctcccgggttcaagctattctcctgcctcagcctcctgagtagctgggattacaggcgtgcgccaccacatccggctaattcttgtatatttagtagagacggggtttcaccatgttggtcaggctggtctcagactcctgaccttgtgatccacccacctcggcctcccaaagcgctgggattacagctgtgagccaccatgcctggcctattttttttttccttttttttttttagacacagtctccatctgtcacccaggctggtgtgcagtggcgcaatctcagctcactgcaagctccacctcctgggttcacgccattcttctgcctcagcctctcgagtagctgggacttcaggcgccc[186 bp omitted]aggctggagtgcagtaatgctgatcaaagcccactgcagtcttgacctcttgggttcaagtgatcctgccacctcagcctcccaagtagctgggaccacaggcacacaccacacctgggtaatttaaaatttttgtgtagagacaaggtctcactatgttgcccaggctggtctcaaactcctgggctcaagcgatccttccaccttggactctcaaagtgctgggattacaggcgtgagcccccgagcttggtcctggtcatttcttgactgcctgtcacttggggccacccagcccgccagtgtctgacttaggcttctggctgattctctgcggccactaagctcacaattggggaaccgactccatgattttgcaacatttcgatgccggaccctgacgcattactgtgagtcgggagggtcacgttccgtttgttttttgagacggtctggctgtcacccaggctggagtgaagtggcattggtgtgatctcagctcactgcaacctctgcctcctgggctcaagccatccttctgccgcagcctcccggcatgtagctgagactacaggcgccaccattcccagctatgttgtttttttttttttaaagaaagagacaaggtctcgctgtgttgcccagggcaatttcaaaattcctagactcaagcaatccctccgcctcggcctcccaaagtcctgggattacactgggattacaggtgtgagccagcacaccggctgtggg[136 bp omitted]ccccgtctctactaaaaatacaaaaaaatttgcggggcgtggtggtgggcgcctgtagtcccagctactcgggaggctgaggcaggagaatggc[136 bp omitted]agttctggataaagaacaatgtcaattaaaaaaggggtcccatcagtagaggctgaaatcatgactgaaactagcttaaagcccaaagcaaaacaaaaacccgaaagaaggccaggcatggtggctcgcactatcccagcattttgggaggctgaggcaggtagatcaccagaggtcaggagtttgagaccagcctggccaacatggtgtactaaaaaatacaaaaattagccagctggagcgcagtggcgcaatcatagctcacttcagccttgaccttctggactccagtgatcctcccacctcggcctcctgagtagctgtcccagctgtcccacttactcagtgcccctccggacccagcaattctttttttttttttttttgcagagatggcagcatgtctcaaactcctggcctcaggcaaacctcatgtgtcagcctcccaaagtgctggaattacaggcacgagccaccatgcctggcctagattcatttttttagatgcagagaatctgggctttggatttaatgacttaccaaataaaggctgtcttttttttttttaaaacaaatcagcaaaacaggggctcttggctagtttgcatgaggcatccagggatggagagatgtgtatttaagctaaaaaaagaaaaagtgaaactcacagcagtctgagtttttattcagaaaaggaaaaaagaaagcaactgagagcgaaatagtttcctggaatgctgtttttttttttttttttttttttttttttttttgagatggagtctcactctgtcgcccaggcaacagagtgcaatggtgcgatctcagctcatcgcaaccttcgtctcccgggttcaagtgattctcctgcctcagccttcccagcagctgggattaaaggcccctgccaccatgcctggctaatttttgtatttttagtggagatggggtttcgccatgttggccaggctggtctcgaacccctgacctcaggtgatccacccaccttggcctctcaaagtgctgggagtacaggcatgagccaccgcatccgaccttgaaatgcactttctttgaaacacgtcctcccctttctcaccataaactccctcacactctgcaggtttacctaactgtatgcatctaattatgtgattacctaaaagttccaggaacaggctgggcacggtggctcacgcctgtaatctcagcactttgggaggccgaggcgggcagatcacctgaagtcaggagtttgagaccagcctgaccaacatggagaaaccccatctctattaaaaatacaaaattagccaggtgtggtggcgtgtgcctgtaatcccagctactcgggaggctgaggcaggagaatcacttgaatctgggaggtggaggttgcggtgagctgagatcgtgctgctgcactccagcctcggtgacaagagcgagactgtctcgaaaaaaaagaaaaaagaaagaacgttttagagctaatctggagacaggccaagcacggagacccacctgcaaaatcccagagatttcctcaaggtggtctgcaacccggcccttattaggatgaggccagcctgcgcttttaagccaccaaaattcatgaacacacagagcttataatcagcacctcccctgcacacccaccattcccagttccccttttttagcccctcaccccagcctcaagtttgaaggggtttctggaggcctaaaccagctgcctccctgctgcgaactctgaaaggaagtcaccttcctttcactgcactttttcctccttactggtttgtcaagactctggcatcggagcctgagctggttacagccaggcactgtcaagctgttgggggaggggatgacaaattccctcccgttgagaaccacttggttaaacctgtccaactggaaggagtaacaaattgctcataaaatatgcatgttttggtgaaaccccttctctactaaaagtacaaaaactagccagaaatcgcttgaacccaggaggtggaggttgcagtgagcctagcactgcactccagcctgggtgacagactgaggctacgtctcaaaaaaaaaaaaaaaaatgtgcttgtttggcccaggagaggcaagaggtcttcttcacctacgttactggtgagaaaactcaaacctgagggcggcccacgccggagtgcagtaacaggcagaactggaacctggccccatcccggactcaggggacgggtgtcatataccccctctgcctcatccttcccactctgctaaccttccaaagatcccccgggttccgagttttccctggccgcttgatgggattcgaacctgcaaactcagcgctcgcccagcgcagcggccccgcctctcctcccctcccgccgcccggaggtcatgtgagcgcagtgccggagcggggcggggcgaggcggcggcgcgcagtgcctactagcaattgtagtccttgccccaccttggcctggcgaagatcccgcccctggaactacgctcccgtcgtgctccgcggctccaggcggagacgaggcggggtgaggtgggttgggccgggccggttgctaagacttggcgaagcgctgcgctcgcgcccggatccctcaggtaagcgcgcggccccgaggtctcgggttctccaggctcagacttccccagagggggagtaggggctgacatggggggtctcggcggtgaggggcgccggccgtttgtggggagaaaacggggggcccaggccagcctcgcgcgcgtctcgggcgggccggtgggcgacgcggggaggcggcgcgaatgcgcgtgcgcgcgcgcgcgcggcgctggcctgggggaagcctcaggaccgcgctcccccgggcctagcgcctttctgcgcgtgtgcgcccttatggtcggtgcgggagaccccgtatcctccagctgcttccggtggcccttcctcaggtcatgtcccgcagtcccctgcctctgaaccgcgctctcgcgagtttccgtagccttcgcgtccttcctccccagctctgattcgcctttatgtggagattcccctaggccttggtacatccccagaattgaccatcgttcctcatcgttacctagagtatgagtttttcaggtttttgtatcacaggcccccagttatctcccacacactaccccgaggaccgaggttccccgctgtcttgcagagaaggcctccttgtagggtggccagaaacagaggatcgactccgtggaaacaaggacggctgggtgcagttcctcaccctataaccccagcactttgggaggccaaggcgagtggatcacctgaggtccggagttcgagaccagcctgtctaacatggtgaaactccatctctgccaaaaatacaaaaattagctgggcgtggtgtcacgcgcctgtaaaaccagctactggggaggccaaggcaggagaatcgcttggacttgggaggtggaggttgcagtgagccaagatggcaccattgtactccaggctgagcaagctagcaagactcactctccaaaaaaaagaaaaaaagatttttttttaataagccaggcatggtgacacatgtctgtggtcccagctacttgggaggctgaggcaggaggattgcttgagccccggaggttgaggctgcagtgaactgtgatggcactactgcattccagcctgggcaacagagcgagaccctgtctctaaataaataaataaaatacatacgtgtagcgccggccgtggtggctcacgcctgtaatcctagcactttgggaggccaaggcgggtggatcacgagatcaggagatcaagaccatcctggctaacacggtgaaaccctgtctctactaaaaataaaaaaaagccaggcatggtggtggacgcctgtggtcccggctactcccaaaggaggctgaggcaggaaaatggtgtgaactcaggaggcagagcttgcagtgagccaggatcgtgccactgcactccagcctgggcgacagagtgagactccgtctcaaaaaaaaaaaaaaat[132 bp omitted]aatatggtgaaatcccacctctactaaaaatataaaaaattagccaggcatagtggtgcacatctgttgtcccagctgcttgggaggctaaggcaggagaattgcttgaaccagggaggcagaggttgcagtgagccaggatcgcgccactgccctccagcctgggggacagagtgagactgtcccaaaaaaaaaaaagcccccacgcagactattggtgtgccctggaactgagcattagctgttccctctccgagttctctcccctacttccccagccttccaggctgggctgtgggtcactgcctccgaggagccctcctggattctgctgaagatggtcaggcccctccatccccccattttctcttatgtacctgacagccctgccttaaaaaaaaaaaaaaggtagagcaggaattcccatttcacaggggtggaagccgaggcttggaggagtcaggactggtgcctgagttctcgcagtcaggaattgaccgcgctgggctgaacgcctctagggcaggttggggactgggtgtgttttctgggtggacatacccaggtcccggcgcggaccttggcctcctcatctgtgggcttagataaaggcctcccagcctcctgttcaccagggttgtcaccacgcagggtctgactcacctgcctggagctatgccggttcccagcccaggctggcggccgtgttctgctgggacctgggacctgggctgcctgccctcctgaggggtcccagtggtcggtcgcctgccttctgggtgggtgtggtagagggagggtcaggtggccccctgctgttggggggcagtcgctgtgggagtgagtcgtccccccgggccatagcaggtaggtaggaggtgctctggcagttgaggccgccctggcctgggacagtcaatcagcctgaacactgtgcctgttccgggattttgacctgccctccaagggcgcggcgggcccagcctgcagtgtcccggcagctgcctcctctctgggtcgtttgtttttcatcagacagaggttgtactcttggagggacaagcgaggctgtgtttgtcttttaccctggagacagtggagtgtttgtggcctagcagggccgtgcgggcctctcggtcctggtcgcgcgtggtgtgcgttttgggagggcccagcgagtcggctgctatgggccccacctggcacggggcctcgggcagcggcagcacctggcgctgcctccgcgcttcctgctcccggctcccactgcatctccggttctgtgctttgttgaacgcgtgagcttcgggcagcgctggggccgcttcagcgtgacctccaaggccactggcctggagttccactggctgctggtcccccatctgtggggcgccccggcggctgaggcgtggaccaggcagtgcatgtcgaggagtagcacccacagctgcgcggctgcgaaatgatccagagacacatccctgtctgcgggaggagccgtccataccagcggggatgtgtagtccaggctggcagttcaggatcacccggctggagtcattttaagatcatctgcggcttagccccagcaccatctgaggcagtactgtctgctagaaataactgtgagcacacaggtagtaaggtttttaggattttattattatttatttatttgaaaaaaggaacagggtctctctatcttgcccacgttggtctcaaactcctgtgcttaagtgatcctctcgccttggtctcctgagtagctgggactacatgtgcacaccaccgtgcccaactaatttatacttttaagcaatgtgggctgggcacggtggctcacacctgtaatcccagcactttgggaggctgaggcaggtggatcacctgaggtcaggagttccaagaccagcctggccaacatggtggaaccccgtctctactgaaaatacaaaaattagccgggcgtggtggcatgtgcctgtattcccagctactaggggggctgaggcaggagaatcgcttgaacctgggaagtggaggttgcagtgagctgagatcatgccactgcactccagcctgggcaacagagtgagactctgtctgaaaaaaaaaaaaatgtgggctgggcatggtggcttacgcctgtaatccaacctcaggcctgcggtgcgagtctgtgggggcagatgcaggtgggggaaggctggccagctgagactgtggtttgggggtgttcaggtggggtggatgccagagatgtgggagccagaggcgctgtcccccagggccctgtgagcagtccctgcaggctggctgtccccacgcctgcctctctgctgtgctgtctgcccgcctagggcaggctcccttctaatgggcggatcccgagagctgggggccccaccagcccttcctctccagtggagtggccctactgcctcatgtccacctgtgccagcagcagggatggtaatggctctactatctcctgtcctcacctgtgccagcagcagggatggtaacggctttactgcctcccgtcctcacctgtgccagtggctgggatgtcttcacctgtgccagcagcagggatgtcctcacctgtgccagcggcagggatggtaacagtgctggtgatgtcaggccgggaggttctcacccgagagccgccttggcacactgcccggcagtcagggatgttagcaggagccccgggagtgatcccagctcttcccgcagccccactccagccagggcctcctctgtgactgagtaagcagggacaccccagtggctgcctgctccacccgacagccagggcccaccacagctgcaggaatgtggtcaagggatgggaagtcgggcccaccaggggaggggctgcgctccggggcttacgtttcgtggcttgtcttctgaggtctctcttttcctagcccttggccgactagggggcgagtgtttacagaaaccactggaggtgggtgttccgtgtcagtgccaggctgtgtgctgttctgggagggggccccgtgtcccccacacttggcatgcttgctttctgtcactgcatagcagactccgtgcatctgtgggcttaatacaacacccgccagctcccggttctgtgggtcggggcctgaatgtgacatggctggctcctctctgcggggtctcaccgggctggaacccaggtgtcagccagggctgtgttgtcatctggaggctcaacgggggtggcatctgcttgcaactcacgcaggcgttggcggaattcagcagcttgcggccgggggaccaagggtcctgctcagttcctggccacatggcccttctgtctggaagccaggcgccgcctgtccccgcttctgcttccaggctctggcttctggagatgcagagatcacatcagtggttgcctgggttgctgtgtgtgttgtagggtggtgagacaagttttctcttaggggtgatggaatgttctggaattttatagtggtgatggttgcacaactccaagtgtc[141 bp omitted]cccaggttcaagcaattctcttgcctcagcttcctgagtagctgggattacaggtgcgtggcaccatgcccagctaatttttgtatttttagtagagatggggtttcaccatgttggtcaggctggtctcgatctcgtggcctcatgatctgcccgcctcagcctcccaaagtgctgggattacaggcttaagccaccacgcctggcttttttgttgttttttgacagtctcgcgctgttaccaggctggagtgcagtggcgcgatctcggctcaatgtaacctgcgcctcccaggttcaaccttctgggttctcctgcaagcctcagc[131 bp omitted]ggcctcccaaagtgctaggattacaggcgtgagccaccgtgcccgggttttcattttttttttgagatggcatcttgctctgtcagccaggctggggtacagtggcacgattgtagctcactgcagccttgaatttccggcctcaagtgctcctcctgtttcagcttctcgagtagctgaaaccaccggtgtgtgccaccacgcccagctaattttttgatatttagtagaaatggggtgttgttatgttgcctaggctggtcttaaactcctgggctcaagtgatccccccacctcggcctcccatagtgctgggattacaggcgtgagccgctggtacctagccatgaattgtgcttttgaaaatgacctgtcttggctgggcgcagtgactcacacctgtaatcccaccaccaggttgaagcgggtggatcacgtgaggttaggagttcgagaccagcctgaacgacgtggtgaaatcccatctctactaaaaatacacaaaaattagtcgggcgtggtggcgcatgcctgtaatcccagttactctggaggctgaggcatgagaatagcttgaacccgggaggcggaggttgcagtgagctgagatcatgccactgtactccagcctgggcgacagcgagactccgtctcagaagtaaaaaaataaaataaaaaaaaaagaaaatgatctgtcttctggtaggtgaattatatcttcgtttttaaaaaccaatggctgtttaaactctgtgcacaccaggggttagcaggacatgagggagtgtagctctgatgcggtgacctgggccggagccctcggactagcctcagctttggtggcagcacgccctgccttgtggagccacggcctcccgggacggactccccggctctcccccagccgcccgcagccgccggatgatcctctgctcccgtctctgtctcccacagtcggcctcgctgaggatggagcccgccccgggcctcgtggagcagcccaagtgcttggaggccgggagcccggagcctgagccggcgccgtggcaggccctccctgtcctgtccgagaagcagtcaggggacgtggagctggtgctggcctacgccgcgcccgtcctggacaagcgccagacctcacgcctcctgaaggaggtgtcggccctgcacccgctccccgcccagcctcacctcaagcgggtgcggcccagccgcgatgccggcagcccccacgccctggagatgctgctttgcctggctgggccggcctcgggcccgcgctcgctggctgagctcctgccacggccggctgtggacccccgcggcctggggcaacccttcctggtgcccgtgcccgcccggccgcctctgaccaggggccagttcgaggaggcccgggcccactggcccacgtccttccacgaggacaagcaggtgaccagcgccctggctgggcggctcttctccacgcaggagcgcgccgccatgcagagccacatggagcgggcggtgtgggcggcccggcgggcagcagcgcggggcttgcgggccgtgggggccgtggtagtggacccggcctcggaccgcgtgctggccaccggccacgactgcagctgcgcggacaaccccctcctgcacgccgtcatggtgtgcgtggacctcgtggcgcgcggccagggccgcggcacctacgacttcagacccttccccgcctgctccttcgccccggccgctgccccccaggccgtccgcgcaggcgccgtgcgtaaactggacgcagacgaggacggcctcccctacctgtgcactggctacgacctgtacgtgacccgcgagccctgcgccatgtgcgccatggccctggtgcacgcacgcatcctgcgcgtcttctacggtgcgccctcgcccgacggcgccctgggcacccgcttccgcatccacgcacggcccgacctcaaccaccgcttccaggtgttccgcggggtgctggaggagcagtgccgctggctggaccccgacacgtaggcgccgccctcctgcctccggacccttcccgctcccggccgtggggcgcccctcctggacttccgggcctcgatttcttccgcacaagcctgaccgtggatttcagggacacataccgcctccagcggggagcacgggtgctgccttccgtgcggatcgagctttcctggactcggtcattggggccaccccgtgccagcggtgcccttctgcggccgcccttgctgcgtttgtgtcccctctgtctcgcgggccgggaaactgctctgatgggaaaataaacagcccaaaaccaagtgggtgtctgttaggaggtgtgtgcctttgtggccagggtcccgagtggggtggggtctgtacagggcctggtggctcagccggaggggacctgctgagccacgtgtggtcagagacctgggctgattctggggtagagcaaggcccccagctgctgcctcctttcccgcttctggagtcctgatggttccaggcgtgcctggcccaagtgtgtggacactaggcgtagtccacagggcaccgaccctaaggaagggccctgggatttcgtgtccttcacaagtggcaacaggggaccccaaagggctgatgctagtcggtcacagcacagtgaggactagagccgtttttgcagaacttggagcaggacctgtgggtccacccggcaagtgtccattgcctgaccatgtgggtgcagctttgcctccagacacgcctgctgtgagcccccagcccataggggaggggatccggcaggtgggggctctgcgtggggagctcatgcagtggacagaacaccactgctggccaggagcccgccaggcctgcagtgggggagtccgtgcctgggggtgggactgaggtgggctggagggtcccggatggggccagagccacagcgtggagtgaggaggtgggagccgcagaggcgtgcccagttgagtggtagaggcagcatttgggcctccttcatgctcaggtgctcagctccttcccctgaggggcaggaagtcagggaggagggagtgagaggtgggaggtggcaggcgggcggaggggaagatgtcctgtcccaagagccaggggtgccccaccccacggtgacatgttcctgaacgggttgtgagtggagggctcagttcctgggaactgcctcacctggactgtgggcgggaggcagctcctggccccgtgcccgccccctcgggcctgttcccctgccaggatctgggatggttcacaccccactggtctgtgatgcccagtgggcagcaggcatgcccctgctgggctggcccacctcccgatggcaggtccgcccccaggatcacggaagcagctagatccactcagtcgtgggtggatgtcaggccaggtggggctgctctggtgggtgagctcatggggttccctttcagaacggccagggtgccatgcggatgcgatggggtcttaggccctgcagcgttcaccttgtggcgcccaccccttgtgggctgaagccgggatttgggggacgcaggggcctaggacagcggggaaggggcatcctggctggggcggtgggtgggaggggctgcggccagccctgcccgttttgccagcatgggtggtgtgcactggagccgaggggagggggacctgtggggtaacacattgggtcgagtcaggcctgtggctcccgcttagcccactgctgtttccagagcacagggcacgatgaagggcttttcagccacggtgggtgggtggttagcgctctgcccagggcagctcagggttccctgactgtggttgtcttccttccaggcggctgcaggcttcagcctgcgctggttggtgaaacagagatgtcaggtgagtcctgcctgcctgggagcctccagcagcgtgggcgggagggagatgccagcagttcccacaggagccctcggtcctggccgttggcaaacagtgtcctcctggcccacctggcctctgactcctcgggtcccgtagcccagcacagctggagtcacgcctctgctgggggcaaaggacagcagagccgcctgtgtatccgctcggacgcctcactgacccgaagcacagcccagccgggtgcccctgccatcacagctgctctttccttatagcagcgggcgtgttctcatgtgccccggggtccctcacccactcatttactggcagccttccccagtggggcgtaagcccctgaggacagggcctcttgctgtctgactccccatctggccctcgcaggcgcccagggacacttcctcaggcagtgctggctgagcagaagctcctggggggctcccagtgccacgctgagtgccccaaaggctgtgttcccatcttgatccctggaacctgtgagtgggacctcatttgggaatatggccttaactccggacgtgatggagttaagataaagtactggagcagggcgag[223 bp omitted]gaggcaggagaatggtgtgaacccgggaggcggagcttgcagtgagcgagatcgggccactgcactccagcctgggtgacagagcgagactgtctcagaaaaaaaaaaaagagatggtccgggcgtggtggctcacgcctgtaatcccagcacttttgggaggccgaggtgggcagatgatgaggtcaggagtttgagaccagcctggacagcatagtgaaaccccatccctactaaaaatattagctgggcatggtggcacagcacctgtagtcccagctacttgggaggctgaggcaggagaatcgcttgaacctgggaggcggagttgtggtgagccgagatcacgccactgcactccagcctgggtgacagagtgagactggatctcaaaaaaaaaaaaaagacatggagatacaggaggagtcgtcgtggagatggaggcagaggccagagctatgcggccatgagccaagggcgctgggatcccccagaagctgcttgagagaggcaggaaggctccttccccggagcctgcagagggagcgcgttcctgagacaccttgatctcagatttctggcctccaggactgttagcagataaatatttgttgtgttctttgttttgttttgagacagggtctgggtctctcccaggctggagtgcagtggtgtgatcatagctcactgcagctttaacttcctgggttcaagcgatcctcctgcctcagcctcccgagaagctgggaccacaggcacgcaccaccacgcttggctaatttttgtagtttttgtagagttggggtctcgctaggttgccaggctgatctggaactcctgggctccagcagccctcctgcctcagcctccaaaagtgctgagatcacaggtgggagcccccacacctgggcagtttctgttgttctaagcctcccagtcggtggtggtttctcacagcagccatggggaacggaagcgtccccaggccacagcctccccgcagtgtgcggactcggcctgctgagcctgcatgttggcgtccctgcctgccggagggaatgatactaaatgcagcctgctgcagccgcacccacactaaacatggaggagggctacgaagagtagcagggccctgcatgaagggtgacacgtaaatttaaaaaacaatttcggccgggcgcggtggctcacgcctgttatcccagcactttgggaggcagaggtgggcggattatttgaggtcaggagttcaaaaccagcctggccaacatggtgaaacctcgtgtctactaaaaagaaaaatccaaaaattagccgggtgtggtggtgggcgcctgtaatcccagctacttgggaggctgaggcagaagaatcacttgagcttgggaggcagaggctgcagtgagccgagatcgcaccactgccctctagcctgggagacagcgcgagactccgtctcaaaaaaagagtcataaacttagttccttaaaacagtgaaatcagttatctgacagttctggagaccagaaacgctaacatcaagctgtaggccggttcccgccttgcccagcgtctagaggcgcccccatccctccactcagggcccctttctcccccttcacagcctcagcgcagcctcttcccgtttctctctgactcccaccctcccgtctcctctcgtgaggctgccacgaggaccctctcctgtctcagcgtcctgccctcaatcccaactgcagagtcccttctgccatgagaggcaacccagccttgggtcgaagggatgaggtggggcctccttcaagagacaaagtctggttctgtccgtgggttctctgtccctacagaaaaggagaacaacttcccgccactgcccaagttcatccctgtgaagccctgcttctaccagaacttctccgacgagatcccagtggagcaccaggtcctggtgaagaggatctaccggctgtggatgtgtgagtgcgcctgggggcaggaggcgggaagcgggaggcagggctccccgagggagggagtggcattcaggcaggggcagcccgtcgggggcccaccgtctactgaagccgtcctgggcctggtggtccctgcggtgaacgaggctggtgtccaggccccagtgtcttggcttgcacagttcatcctcgacatggggtcactgggctggggaggcggacagcgggtgccccattgctgggcccatgctttcccacggccacaccctcccgtgcctgctcatccgtcctccctctctcttcgcagtttactgcgccaccctcggcgtcaacctcattgcctgcctggcctggtggatcggcggaggctcggggaccaacttcggcctggccttcgtgtggctgctcctgttcacgccttgcggctacgtgtgctggttccggcctgtctacaaggccttccggtgagcagagctgccgggggccgtctgcacccagagggaaccagggcccactctgcaccccagtcccagcccagctgtgaggagctgtccctttctctgcccagtgtgaaagacagttcacatctgggggtggcaaactgtggcccacaagccagagccaactactgtctgttttgttttgctttctagtaattttggctgggtgcagtggctcaggcctataatcccagcactttgggaggccgaggcaggcggatcacctgaggtcaggagttcaagaccagcctggccaacatggtgaaacgctgtctctactataggtacaaaaattagccaggcgtggttgcgggcgcctataatcccagctactcaggaggctgaggcaagagaatcgcttgaacccgggaggcagaggttgcagtgagccgagatctcgacactgctctccagcctgggcgacagagtgagactccatctcaaaaaaaaaaaaaaaggaataaaatagagcctccgctctcaccatctctgactggcccgttcctctctaggcgcgtctgggagaagccagggctgtggtaaccgtcgtgttttctgtccctccccagagccgacagctcctttaatttcatggcgtttttcttcatcttcggagcccagtttgtcctgaccgtcatccaggcgattggcttctccggctggggcgcgtggtaagcctctctctgatgggcgtggtggctgtgatgtggctcagctgccaggttgtgggcctgctgggaagccaggcggccaccggagcgtgctggtccgggattgtacgcgctctcctagggaggggtctgagctcaccctggcagcgcccgcgtcctcgccagcgcccgcgtcctcgccagcacccagccatggttcgcgattgtaggcactctcctagggaggggtccgagctcgccctggcagtgcctgcgtcctcgccagcgcccagccaggcttgtctcctgagtgttgatcacacccctgacccggggtctgggagccagttcctggctgctgatgtttctgcacggatcgctgcaggaggaagacctgtacatctgtaaaaacacacatacctggtgctgttaccacacctgagaaactcacagtcactctctaaggctgccaggt[132 bp omitted]acctccacatcctgggttcaagcaattctcctgcctcagcctcccgagtagctgggactacaggcgcccgccaccacgcctggctaatttcttttgtattttagtagagacggggtttcaccgtgttgcccaggctggtatcgaactcccgagctcaggcaatccgcctttctcagcctcccaaagtgctaggattacaggtgtgagccactgcacccggccctttttttaaactattattatttttttttgagatggagtcgctctctgtcactcaggctggggtgcagtgacatgatcttggctcactgcaaccttcacctcccaggttcaagcgattctcctgcctcagcctcccgagtagctgggactacaggtgtgtgcccccacacccagcaaatttttgtatttttag[158 bp omitted]aatttgtaattctcagttgcagagagtgactgttctcgcccacgtccccgacgtgtctcccttgtccttggcacggcgggagctccccacgggtgacgctgctcacggagccgtgggtgcctttggtttcctgggctcccattagcaagctcctgttctggggttcctgccccacaagactgcggtactctcacgccagtgcacagatcagaatccagataaggtcccaggtttcctgggatggtgactcctctcccttcagggcccctcgatctgcaggcctctcccctcctgcacctgcgcctggcgccaggccctccagggtggctgggatctgtggtttgtgcacccctcggatgtgccgctgaagctggtctgtcacctgccaccccaagagcctgagtgacgttgccccagggatctgagttagagtcatagtgagcgtgtgcctgggactcccagctctgccagcctttggggtgcttccccctcctgcagaggctgtggctgcaggtcaaggcactgctcgtcatcctccgagtcctcctgagctcccagctgccagctcggctcccactggcccttccctgggctccagtgcctcctgtgagccgcctccccggtgcgtccccagctctcccaggctgagctgggtggacaggcctgtgcccgtgttgggtggtcctgagatcccggcatgaggtgagtgcccacatgtgaccctcagagacctccctgccccctcggccctcgtgcacgtgcggcagcagcgacttggctcttctcattggagcctgggtcatctcccgcaggtcacgggagaagctgagcatgcggtccctgcccgaggtggacagaaggtgaacgctcttgagaaagaaacccagcgggtcttaggagagcccggccccccttgtaatgagagaaatcaaaccacagcgcacagcgacttcatgtccaccgttggcttagtgaggccccacgctcagtgcgctgctgtggggcgagaggggacagccccgctctccctgtcctgggcggcttcaccagcgccacctccccacacactctgtgcactgctgtggggcaagaggcgacagccccgctctccctgccccgggcagcttcaccagcgtcacctccccaggggtgacgcatgcccgaggccatgagccacggcagcatctgtggtggcagaggactggaaactccagagaaatgacccccagcggggcctagctgtgtagatggtgagggtggccacatggcggcagccaggtactgaggacacggtgcagcaggggcccccggtgggccccgccaggaatcggacatcagcgggcgccgcagcctctaagcggagcatgcagcccactgacagtgtgctgggtgcctccctagacctgacacttgcatgcgggggcgtgcgatgctggccagtgggaagctgcgggggcggcggcaggagtcctcaaatgcctttgccgcttttcataaatctaaaattacatccaaacagaggtttacttttttaaaaaataaaagaggccaggcatggtggctgacgcctgtaatcccagcgctttgggaggccaaagcaggagaatcactgcttgaggccaggagttcagactggcctgggcaacatagggagaaaccatctctccagaaaaaaaaaaagaggaaggaatgacccaaagaccatgcagcctgtgatgctgtggaggctccaagcaggcgaacacaggacaggccagcatcttgcagggacgcggcggggggtaccgcgtgtgcgtgcatatcacgccccgtgcatgtgtgtgcataagctccccggacacatccgggggtgtgggtcctgcgggctgcctgtgcaccagggaggggagtcagcaggagagagactgtacgtcgtgcctgcctttaagttccctgaattttaaaccctgtggtttcatcacctgttaagacaaaaatctcaaaatgactgttttctgcctcctgggtctcaaaggcaggtgcaatgcccagaggctggtcctgcacagagggacccagggcgtgctggccttcccagtgtcccactggtggctgatctaagcagtgctttccctcgtttttttattttgagacagaatcttgctctgtcccccaggctggagagcaacggcacgatctcggctcactgcagcctcccgcttc[133 bp omitted]tcggcctcccaaagtgctgggacgacaggcgtaagcctctgcgcccggcctcctcattgtttctaatggtccctcagtgcccaccgggtgatggtggcagattttccatccgcattgctcccggacatgcggatgtaggtttcagcagttcccatcattagacacagttgccgtaggctgggttcttagtagcaggctcagtggggcctttgagtctttccatggctggtgcccgccggactcactgagggaaactaatggggaagcactggtctccattccctgcacgcacagcccactgctgcgatggtgaagggataaggttgtgttcacgcgtcgaagtttgtgtccactgcacacgcggctcactgctgcgatggtggagggataaggtcgtattcacgcgttgaagttggtgcctctcagtatcgctttatgtttgttggccacttggtcgtccttgtatgagctgtccactccttgttgattggccagagctctttacatggggaggaccatgggccggaccatgggccctcatccagcaggtgtgcaggcacccacgcactctcttgtcccttgcagcggctggctgtcggcaattggattcttccagtacagcccgggcgctgccgtggtcatgctgcttccagccatcatgttctccgtgtcggctgccatgatggccatcgcgatcatgaaggtgagtcctcggctttgtgacgtccagcccttaccccttctccatgaacctcgtcacccaactgtcccaggtgggtgaacgtcgaggagccgggccctctccccacggtgtcacgcaggccgcacttcatccccagcagtgagctgggatgacagcaggaggcactgtcaccagggacactcccagggacccagcgcctgggttcctatggggccagtcctgtggccccctgggccgggagtccagactccagagggaagcaggggttgtgtgtaaaccgcagtgtttgcaggaacagctgaggccctggagctgtcctgtcagtgagggtggggccccttgcaggttcccggtcacagtttccatctgaagatagcggaagtgttgagctgggctcataacagaaactttcagttacagcaaaatgcttttttttttttttttttttttagacagagtctcgctctgtcacccaggctggagtgtagtggtgcgatctctgctcactgcaagctccgcctctggggttcatgccattctcctgcctcagcctcccgagtagctgggactacaggcgcccgctaccgcacctggctaattattttgtttttgtatttttggtagagacaggttttcaccgtgttagccaggatggtctcaatctcctgacctcgtgatcctcccgcctcggcctcccgaagtgctgggatgacaggcgtgagccaccgtgcccggcctattttttatattgtagtagagacagggtttcaccatgttgtttggactggtctcgaactccagagctcagacagtctgtctgcctcggcctcccgaagtgctgggatgacaggcgtgagtccccgtgcccggccgccatgctcattttctgtcttctgcctccctgtcctctgtccttgcaggtgcacaggatctaccgaggggctggcggaagcttccagaaggcacagacggagtggaacacgggcacttggcggaacccaccgtcgagggaggcccagtacaacaacttctcaggcaacagcctgcccgagtaccccactgtgcccagctacccgggcagtggccagtggccttagagggagcctgccctgcccccaccgcccaccacctcctccccttcattcctgctgctacccctggtcccgagggctgggagtacctggggccccatccccccagctgggatggtggaagccggtggtggccacggaccgcccccctcctgccagggccacagaacccgtgttcatctcatccgagagcggagttcctcacaagcactccccagcagcccttggcctctgccgtccacaggacgccctcttgctcccggaaacgtgtggtcacccgccgtccactgcacggctggtacggccttgtcttcaggtctcgaggcctgactccgggggacaggtggcagcaggtcggccgccctcccgtcctcccagagctgctggcgctgaggtcagagcgggtctgatggggagctccgtctcaccggccacccgccgtcaccatggcagatgcccttggccggaactaataagaggcgtcggggccagcttccggtcccctgcagtgatagagggcttggtgcctagctgagtcctcgctgtccccgccatcccctgatctgtgcggctccagcctcgccccctccccacgtgcaccatacctggggagttcctggtccagggtatcctggggccaccctccctgcctccaaaacagggatccctggcaggctgtctttccacgcccctgagttcagagtcggggacccaggccaggtcgggagcacagccgctccccaaacccagcaaaccggcagagagccggtttcccagcagccggagccctgcaggagaggcctttgtgttttgttttgttttgttttttctcttttgagacaagagtttcactctgtcgcccaggctggagtgcagtggtgtgatctcggctcactgcaacctctgcctcccgtgttcaagcagttctcctgcctcagcctcccaaatagctgggattacagttgcctgccaccacgcccagctaatttttatatttttagtacagatggggtttcaccatgttggccaggctggtctcgaactcctgacctcaagtgatccacccgccttggcctcccaaagtgctgggataataggtgtcagccaccgcgcccagcctggagtggccttttatgagaggggacccgtcaaatctgtgccttatggaggggtccggcagcggccacaattgtcttgtcccctcaccccccaactccccctggaacacctctcccaggcaagacattttcacagcaccattcacaacggttgggccaaaaagaaacttttccttcatcatttcctgcactcgctgaccacaactttggacaccccaggctgccacccctccccacccgttcacccccaggatgctgttgctgtaggacgcctgctgccctggagccctccccaggatgtgagccagtcccctcgctggtacggaatgccgctgggtgcccggaggcggccatggtgtctcgatggacggcagccaggatggagcacccatgggtctcacggccatgcttcagggtcttcaggtcctgcccccggccagtctgccaagaggcacccccttccccagcctctcgcctgcactgatgcagacaaaatctcacctggcaggcccaacccccccccacccctcccccgccgtgtgtggcccctcgccgcatcgttggggttttgttatgtgaaaatatcctggaaataaatacatgtttctgcacttagagccagggacctgccgcgtttgtgctgtgagcatgtgtggttcccccaggccgtcttctcccttgggagacccctcagcatatggcctctggcaggatgcccccctgcagcgcctcctcccacccaggccccgggtgccctgtagccaggtgtgcccagggctgaccctgccatcctggccaacgtggtgaaacccggcctctactaaaaatacaaaaattagccgggcgcggtggcgggtgcctgtagttctagctactcaggaggctgaggcaggagaattgcttgaacccgggaggcggaggttgccgtgaacccagatcgcgccactgcactccccaccggctcaaaaaaaaaggaaacttgcacagatggaaagccagtgtcactggccctacgtaaaaagcaaacatcggccagacgcagtggctcacgcctgtaatcccagcacgttgggaggccgaggtgggcggatcatctgaggtcaggggttcaagaccagtctggccaacatagtgaaactctgtctctactgaaaacacaaaaaattagctgggcgtggtggcacacgcctgtaatcccagctactcgggaggctgaggcaggagaatcgcttgaacctgggaggcagaggttgcactaagccaagattgcaccattgcactccagcctgggtgacagagtgagactctggagagaaaaaaaggggggttgtggggtgtggtggctcacacctgtaataccagcactttgggaggccgaggcaggcagatcacccaaggtcaggagttcaaaaccagcctggcccacatggtgaaaccctgtctctactagaaatacaaaaattagccaggtgtggtggcaggtgcctgtaatcccagctacttgggaggctgaggcagaagaatcagttgaacctgggaggcagaggttgctgtgagccaagataacgccactgcactgcc[148 bp omitted]cccatctccactaaaaatacaaaaaattctccgggcatgctggcgggcgcctgtattcccagctactcgggaggctgaggcaggagaatggcatcaac[143 bp omitted]aatactttgttttttgagaccgagtctcactccgtcgcccacactggagtgcaatggcgcgatctccgctcactgcaagctccgcctcccgggttcacgccattcccctgcctcagcctcccgagtagctgggactacaggcgcccgccac[174 bp omitted]gtggcatacttttttaaatgtgtgcaaaactcttgaacatctggcttcatagaggacaagagggatggctcagcagctctgtcgcaaaagggtgttttaccacaacaaagattgagggcaaatggtctatctaggatgtgagcccaggaagtaccgaaggggtgtggggatggggagtggcccatagggaggcatgaacagggaggttacagctccaggctgctggagctcagtccctctgaggatctggctcaggttgtcgtccggaggtgagggagctggggtatttatcctccaactcccctgcaaatggtatgggggctggggaggcttagctccgccctcaggtagagagtcatagatgctggtctgtgtgtgttgtgcttgtgttgcgtgtgtatcgtatgtgtgtgtgtgtatgtgcatctgtgtgtctatgagtgtctgtgctttattacagattgaattaggtcctccccaatacccatatgttcacaccctaagccccaggacctcagaatgtgactttgcttggaaataaggtcattgaggatgaaattatatagttaagatgacttcattctggagtagggtgggcactgatccagtgtgactggtgtcctttacataaaacaggaaatttgagctgggcccagtggctctcacctgtaatcccagcaatttgggaggcagaggcaggaggattgcttgagcccaggagttcaagaccagccttggcaacatagtgagaccctatatctacaaaaaaaattaaaattagccaggtatggtggcatgcgcctgtagtcccagctactcaggaggccgaggtgggaggattgcttgagaccaagagtttgaaaccagtctgggcaacatagcaagatctcatttccacaaaaaatacaaaaagtgtcagggcatggtggcacatgcgtgcattcccagctactcaggaggctgaggtgggaggattgcttgagtccaggagattgaggctgcagtgagctgttaacggcgccactgcactccagcctgggtgccagagagagaccctatctcaaaaaaaaaaaaaaaaaaaaaaagccaggtgcagtggctcacgtctgtaatcccggcactttggcacaccgaggcgggtggattatctgaggtcaggagttcaagaccagcctggccaacatggtgaaactccgtctctactaaaaatacaaaaaattagccaggcgtggtgatgcacacctgtaatcccagctacttgggaggctgaggtgggagaatcgcttgaaccgggaggtgtaggttgcagtgagccaagatcacaccactgcacttcagcctgggtgacagagcaagacaaaaaaaaaagggaaatttgggacacagacacacacaggacgaacaccatggtgaagctttcgcaagccaagaacgccggtcaccgccaagagaggcctgggacagagtccactcgggctcagaaggatccagcgtcgctcacaccttcgtctgggactcgcagccccagaaccgagagagaataaacaggtgtttgcgccgccgggtctgcggtacctgtcaaggcagccctagcaaaccgatgcgtgtttgcatgtgtgaatgcgtgtgtgcgtttacatgttcaggagtgacaggtgctgcagggtactgacggggaccgcagcctctgctgtgcgtcctaaatatcacgcccctctttctgcaaactgtcgccccagtcactgccccgtcttcccttcggaggtcgaccccgccgccctccgctcggccgccagagggcgacctcggactccagtcggacgggctctgccctggctcccgggcttcaggttctaatagaaactctcgcaggggtgggtcacgcctgtaatctcagccctttgggaggctgaggcaggagaatctgccgggaggcagaggttgcagtgagctgagagcgcaccattgcactccagcctgggcgacaagagtgaaactccttctcaaaaaaaaaaaaaaaaaaagaaaagaaaagaaaaaaaatggggagtgtccgcctctggacaaggtgcagccggcatgatgtggctcctgagtggccacgtccccttcagggtcacaggggcgatccagggaatgaggaaaggaagacggaactgcaggcatggcgggggacctggcgggcagctgggggcatcgtgtgcccccccccatggctactgcccctggtggtgagtccccggggtgggcatcactaaaagagtgactgtgatggcttcattgggctgggccctccaggctccccctccacccctgccactgagctccacgcccggacccaggcctgggggcactgcagggacggatcctcaaccctctggcttcagcttccatcccagcggggtccagctggggacttgcaccagggggcagggggctgggagagtgagggaggaagagtgagggaggggaagtgaggccgattgtcggtccctggcctcctccctctagaggacagcctgtccatgggggtccctctctgcagcccatcccccacctgtaaggcgcccactgttgccaaccccaggggctgtgtcattccgcgttgctgcccctcaccctgcctacgcctccacaaaccccactgctaaatccttcttccacatgagggagccatcgccttccaacagcaatttaggagggtgaatgtgatgtttgggatgtctcacgatttcccagcatgaacgcacaatctcaagctgtgtgtgtgtgtgtgtgtgtgtgtgtgtgtgtgagagagagagagagagagacagacagagagactcactctgtcgcccacactggagtgcagtggcacaatctcggctcactgcaacctccacctcccaggttcaagcgatcctcttgcctcagcctcccaagtagctgggattacaggtgcacgccaccaaccacacccagctaatttttatatttttagtagaaactagtttttgccatgttggccaggttggtatcgaactcctggcttcaagtgatccacccgcctcagcctcccaaagtgctgggactacaggcgtgagccacccagttgagtcatttttttcttttctttttttttttttgagacggagttttgttcttgttgcccaggctggagtgcagtggcgtgatctcggctcactacaaccaccacctcctgggttcaagcaattctcctgcctcagcctccagagtagctgggactacaggcatgtgccaccatgcccagctaacttttgtatttttagcagagacagggtttctgtttctccttgctggtcaggctggtctcaaactcccaacctcaggtgattcacccgcctcagcctcccaaagtgctgggattacaggcatgagccaccatgcctggccccccagttgagtcatttccagtcttctgagccccagaaacttgataagatgtctgttgttttatttattaattttatttttgttttatttatttatttatttatttatttatttgagatggagtcttgctctttgcccaggctggagtgtagtggtgcgatctcggttcactgcaacctctgcttcccaggttcaagagatttccctgcctcagccgcccaagtagccaggactacaggcgcccgccaccacacccagctaatttttgtgtatttttagtagagattgggtttcaccatattggccaagctggtctcaaacccctgacctcaggtgatctgcctgcctcagcctcccaaagtgctgggattacaggcatgagccatggctcccagcctcttcttttttattaaaaaaaataataatttgtttttgcttaatttatttcaccagtcatatcacaaagacatgtgttgttttaggccactgagtttggtataatttgttatgcagcagtagctgactgatacaataggtgttcctggattatcttcagaaacctgataataatatgtacactaactagggctgtatcagggtgcatggcagggtttttgaaggcattttaaagaggtttagttcctgtcctcaggagctgctgcctagtggggcagacagaccatgaatatccatcatggaaggcagaacacataagtacatggacgaaagcagttccagaggctggtgggttggattcatttggcctgatgtatcatggagtcctcccaaaagaggtgatcatctgcctgagctttgccagacctgttgggctgagagaagccagacaaggctcagatgggtggagggtcagggtgggttggaaaggaacaagtcagtatgggtgcagagggcgtcctgatggatagatggggctgcgaagtggaaccagccattgaggcagcctcgaatgctgtccccattgtggggactttgaaaagccaccctcctttgaaacacagaaggggcaaggagtaaatttatatttctttttttctttttttttgttttgagacggagtctcactctgtcacccaggctggagtgcagcggcaccatcttggctcactgcaagctctgcctcctgggttcacgccattctcctgcctc[135 bp omitted]gcctcccaaagtgctgagattacaggcatgagccaccgcgcccggccaatttatatttctggtaaggggtgggaagaaggagctttctcaggctggaggggagagaagacagatgagcacagacactcctggcagcggcatgagggccggggagcaggtgcagggcacagcggggctctgcagggcggttgtagttggtgaggaccactggagcagggccttgaagggcgtcacccctcacctggctgcctctgggccatcctccagtctgccagggactagcagaggggagaaagtgggagaggaatcattatttgatgacctcattcagccctagggatttggggtggctaaggtagaatggcagtggattatatctgacatgatgcggggtgtccgggctcagctgggcagttctgctccctgtggtgatggggggtaatcagcaatcatttagtggctttccctggccgggaatgtttgaggtagctcactcacagggctggcaggtggtgcctgctcagtggtgccatcacccaggggcttccaggtggctgcctcacaagatggcagctgggttccaagcagaaaggacgctgttgagttcttttttttttttttttttttttgagacacagtctcactctgtcacccaggctggagtgtaatggcgcagtctcggctcactgcaacctccacctcccaggttcaagtgattctactgcctcagcttcccgagtagctgggattacaggtgcccaccaccacgcccagctaattttgtatttttagtagagacagggtttcaccgtgctggctaggctggtctcaaactcctgacctcgggtgatctgcccgcctcggcctccccaagtgctgggatgacaggtgtaagcaccatgcccagcctactgtcgagctcgtaagaccctccctcagaagtctcaaggcaccacttcccctgccttctgttgctaaaacaggtcacaggagcagctacattcaggggaggggaaatgaactgtgtctttccgtgggaggagcagcaaagaatctgtgaccatcacacccagcttttgaaccacttcttctttgtgtctcagtgtttgtggcatgcagcatccctgttgcctgggtccaggatgccaccctcctactggggttgcagcaccaaggggctgggcattccatcgagctgaggggtgggggctctggatgggaggctccctggggggagctcacatcttccatgaagcatcatggtcattgttgccctgtcctgcaccctgtccactgcaggctgccctctgtggctggccttggtgacaagagatgtgggagagaccctggtcaccaccatgggaggagtccccaggcaccaggggcaaatgaacagagtgaatgccaggaggaccatttaggtgcaatatgaccaaaaataagttaagtccaagtgggctgcatcatcaacaagaacatcccccagcctccatgaaacagcccaaaacctggagcaagacggttccctgacgctgagcgatgccattcacagcagcgttcctgaataccccccatgcaggcactcacatgctcacacacacaatacacaaaccaacacacaccacacacaggcatgccaaacacaggcacacaaatgcacacccccccatagacccaccgacgaacacacacacacacacccagatgcacaggtgcgcacacacacccacgcacacaaagacccagagacagacatgtgcacacacatacatatgcacacatgtacgcagatacatatgacacaaatgcatgaacacatggaccacacataccaacatgccacctcacacagacacacctaacacacacacacccgtgcacacatgtacatggacatacacactggaaaacaacaaacacatatacaaaatgcaggccggttgcggtggctcatgcctgtaatcccaacactttgggaggccgaggcagggggatcacttgagcctgggaagtgagggctgcagtgagctatgattgaatctctgcactccagcctgggtgacagagggagaccctgtctcagaaaaacaaaacacgaaacacaaaatatgaccgggcgcagtggctcgcgcttgtaatcccagcactttgcaaggccgaggtgggtggatcacaaggtcaggagatctagaccatcctggctaacacggtgaaaccccgtttctactaaaaataccaaaaattagctgggcgtggtggtgggcgccggtagtcccaggt[139 bp omitted]cacacacaccaacatgttacatcatagacagacacacaaaacacacaaacatacacccatccatggacatacacacagacacacacaaacatcaacacacagcatcccacacagacacacaaacacacagccatgtaccctcaaaggacgctgcaggatgagccttcattctctgggacagcagagaaagtagacaaaggagagaaacttctctcagagtcacccatcctctgactggatcccgtgcccctgtgaagaggcagatcccagtgccccacacttggctctggggccacccactgccgccaggctctgtccctgcggttggtgggggtgagggcagaccctgctctgtgctgcttcctcacccaccaaaacttcctgacgtcgccctgttccgttggctgcgctgcatatgggaatgcagtgctgggcaggcccagcctcccagctgggaaggggtgtcgccactggctgcaaagacaggtcttcttttcccccaagtctgtgtttatgccctactagagactgttgggtgtaattcccagaaagttctggaatgatctaaaatgaggaaatagaaaaaagttgtagaatcgggccaggcgcagtggctcatgcctgtaaacccagcactttgggaggctgaggcaggtggatcacctgaggtcatgagttggagaccaacctggccaacatggcaacatgggcagacatcaccaattaatcatcgaatgatgtttctcctgacctccttcctcctgtgtacagggtaggcatcaccaatcaagcaatgatgttggttgactggggaacgctgctgtttgtcctgccttccttcctcttgtgcacagggcagacatcaccaatcaaccaatgatgcccacactgcttccctcccatgcacaaagcagacatcaccaatcaatcgagcagcaccaggaggaaaccaatttggcagttcaatccgtcttcaactctatccttttatagataaggttgaggcccagggacctggtcaagggcaactacagggcagatccctcctcctcttcctgggaattagctttgtctcttgttcctggagcaaattcaggaaaattgcaaggtcatgtacattttcagcccagggcatgagtcacttgatccctgctgtccagagctggacccggagatgatggccaggactgtccccttgcagggaggccactgaggctggcagggccaagactgggcagtgagccactccaggcgggaaagccctttgtcactggagctgctctgaacgctgccgccaagtcgcaggcagctgttgtcatctgctcagcgtccttccccttccccggcaactactcctcctgctgtggggaacctggcccacccgactcctgtgttctcagggcgctgcccctcgtggaacctgcccttctggtcaccaggacattgcctaaaccaggcctggccagtcatctgggaggggccaatgccagacaataagagactttcctgggattttatagcgatcctgggagagaagagctctgttttatttgggggttgctaaactaagccacagctgccaccacggacggaagaagcttggagtgaaagaatgaagccaaggcacagagacggagagacaaggagagggagagagagagggaaaggtagagacagagagagatgtggggagggagagagagacagagagatagagaggtagagatagagacagagggatatagagagggagagagagacggagacagaggatgaaagagacgagacacagttggagatagagggagagatgcagagacagagagagatagagagggagaaatagagacagacagagctaggaagggagagagagacagagagaggaagagaaagggagagacacagagacagagacagagagcttgagagacagagagagaggcagaggaagaaagaggcagaaagacaaatagagagacagagacagggagagacagagacatagacagaaagatggcgagcactccagcctgggcaatagagcaaggttccatctcaaaaaaaaagagagacatagagacagagacaggaaaagacagagagatagagacagagagagagaaaaaagagagagagagagacatgaggacaaagagaaaggtccacaggcactgagcttgagtcacccctggttgcagccatgcctgaaggcagctctgcccgaccgctgagttccacagcccagcatctgtgatgggctgcacctgtgtattagcacgttactgataaggcccagctgctttaacaaatcggcccgcctggcgtagcggctccggcacagtggacgtttacttcttgctccaggccggcgacccaggcagctccacaggtgacctgaggactcacggtccctcatctgggctccatgaccccccagggccccatgtgctcctcctcctggggttggaaggggaatggaggcccagggtggacagcaggaagaagacacgtggctggaggcacaagcccgcggcggcctcagcaacaggacccagctttccttcctgcgaggcatgagtctggcccctgcccccgggctcctgaccctccagccaacccggcctcagaatgagtggccccgagagggccccgggccacagggctgtggggacacctccagctgtaacaggcggcaggaccaggaggtgagcaaggggggaaaagcttccagaagttttcccagacgctgcgaccctgaggctgggccttcaaggatgaatggggcgagagtgggagaagggcttcctgggcagaggatgtgcggctgttgggacagtggcatctctaacaaaataccgtaggtggggcagcttagacacaacaaatttacttctcacagctttggagagcgtggaggttcaagaccaaggtgtgggcagctttggtatctgctgagggcctgtttttgttttttcgttgtttttgaggttagagtgcagtggcataatcttgactcactgcaacctctgcctcccaggttctagtgattcttctgcctcgtcctcctgagtagacaggattacaggcgcccaccaccaagactggctaatgtttgcattttttgtagagacggggtttc[145 bp omitted]cctggtcttacgcgatcctcccacctcagcctccctaactgctgggattacaagtgtgaacgtctctttatgtgagtataggaatagaacagaagggggcacttcctgcctgcctcctcccccaaacctacgctgtttgggatttactgggaggctgggagatcttctctctagaggatgggatgggcgtggacaagttgttatctttataatgttcttattagattaagacctccaaagggtgctgggcgcattggctcaggcctgtaatcccagcactttcggaggctgaggtgggtgctattgcttgagctcaggagttggagaccagcctggggaacatagcaaaaccctgtctctataaaaaattagccgggcgtagtcgggcacggtggctcacgcctgtagtcccagcactttgggaggccgaggcggggggatcacaaggtcaggagatcaagaccatcctggctaatacagtgaaaccccgtctccactaacaatacaaaaaatgagacgggcgcagtggcgggcgcctgtagtcccaactactcgggaggctgaggccaggagaatggcgtgaacccgggagatggagcttgcagtgagccgagatagtgccactgcagtctggcctaggcgaaagagcaagactccgtctcaaaaaaaaaaaaaaaaaaaaaaattaggcgggcgtggtggcgcgtgtctgtgatcccagctactggggaggcttaggtgggaagactgcttgagcctggggaggtagaggctgcggtgagccgagactgtgccactgcactctagcctgggtgacaaagtcagatcctgtctcaaaataaaaaagacccggctgggcgcggtggctcaagcctgtcatcctagcactttgggaggccaaggcaggcgcatcacctgaggtcaggagttcgagaccagcctggccaacatggtgaaaccccatctctattaaaggtacaaaaatcagctgggcatggtggcgggcgcctgtagtcccacctactcaggaggctgaggcaggagaatcccttgaacccgtgaggcggaggttgcaatgtgccgagatcatgccactgcactccagcctgggcaacagagcgaaactctgtctctaaataaataaataaataaaaaccctcaaaggggctagtctcacccccccaccagctgtccccaatgacatcctcatgattaaagctgaaatgaatcaggaacatgtggaccacatttgaagtgggttaaaaatgagaaagcaaggttggccacggtggtttacacctggaatcgcagcttttttacagttttttttttttttttgagacggagtcttgctctgtcacccgggctggagtgcagtggcacgatcctggctgactacaacctccgcctcccaggttcaagcgattctcctgcctcagcctccagactagttgggattacaggtgctcaccatcacgcccgcctaatttttgtatttttagtagagacgaggtttcgccatgttggt[133 bp omitted]gtgcagtggtgcaatcacagcccactgcagcctcgacctcctggttgaagcaatcctcctgcctcaggatcccaagtagctggggccacaggcatgcgtcaccacgtcccgctacttttattttttgtagagacagggtctctgctactcaggctggtcttgaactcctgggctcaacgaagcctcctcctccgtcagcctcacaaagtgctgggattacaggcgtgagcaaccgcgcccgccccacaccctaccttataacatcatctgaaatcattacacagggctctctcctccccctaggaccgaggactccctaggaaacgatgccaagagtctagctcactgttctattctcagagccactggcaggcacttaatacatatttgaatgaatgtgtctccttcgactttaaaaatgcccccaccgggaagtgcgtgggggatgtgggaaggccggaaaccatttctgcagctgccagtccccttccaggccctgtcatgggatggagcagggcatcactgtgcggcgccttggcctgtggatcccctccccacgtttcttgcccggtgcaggccggaaggcaggcaggtacaagcaaggagtcggctctacgcgcagagccccaggggagcggcccgtgctgggcatggcagtcccagcagtgcatttgtctagctgccggccgcgggtccggggccacttcctctctgctccttgctgatgtcacggtggatgaagacaacggggcacccacgtcaccgctgttctccccctgaacacggagcagttattctagaactgttttcccctcctcgcccaggaaagccagatggaaaaaccctcttgccctgaaccagctcattttctggccagtcgccccttccagcgcctgtcccggaaacctcgcggcctagcgcgcgcagcccgccgcctccccgcgccgcgcccgccaccgccccacgcacggaacatcccgcggcgccgcccgtccgtgacgtcaggtggcgagactgtgacgtaacacacggcggcagggcggtgccaggacgaccagccacgcgtcgccatggcaacagcgggcggggaggggcgggcggcggaaggcccgcccctagaagggtgtggaaaccgttagaccccctttcctgcccgcgcgcgccctcgcggccacgcgctttcggtgtcccccgcgggcagcggcccggcggcctcgtagcggccgcaaaacgccgtggccgtcgcgcggcgccatccgttgtcgcaaagcggcgcgagaaacgcccagccgggtgttggccccgccccgcgctgtgacgtcggcggcgcgcgcccccggcgccgtggccgcggctgcgcagtggggcgcgtatggctgccgccccccgctggcagacgctggcggcgtaaggcgcgcgggccccggagcgggcgcggcggagcgcggcgagcccggcgcctcccgtcccgaacatgcggaggccggcccaggcggcgcgggagccggagcgggggcccaagcggcaccggagccggagcgcgagggggcgcggggcccggagcgggggtccgcgctgcgctgctgaggccgggccggccgcccagacgctgcccgcgggcccggccacggcggagccaaggtaacgacgcgcgcgcccgccccggccccttcgccccctgcaccctggccctgggcgcccccagtgacccccggcgcccccgcccccacactcggtgtccactgccctcctgcgccctgccgaccccgtgctccggaccccagcgccccccaacccgtctaaccgccccgcaagctgacccccacactcagggccccaccgccgcaacaccccgttgaccctgcactcgggaccccagcgtcccccaccgccctaacccgcgctcaggacctccggacacagccccacgctgacctccacactcaggagtctgccgccccagtgaccctcacactccagaccctgcccccgccgctccagtgacccccccactctgcaccccggtgactgtcgtgctccaactctcctgccctccgctgagcctttagtccccaccccacctcccgccttcttcccccacccagtgctcaagcccaccgcccactcacccgcgtccctcacgcctccccgcgttctggtcccgaggcccctgcccacctggccccatcgcctcctcctgtcttggcctggcccctccccacgcagctgtgtccccgtcctcactttgtggtcctaaagctcttgagggggagagcagggggtggtgggggggaggaaggtggtctgatccgcagggacctgttgcggcactgcctgggaactcccggctgggctcgctgccccctcccccttccgctgtggccaccggctttgttttccggaaacgcacggatcagggagggagggtgagatgtctgagcagggcctgcggtggcctcaccgatccccgatccccgcctggctcctctctcccaactttcttaggggaagactttcccgttgaggggcgtgggggctgagaggacattcggggactgttgcgtcttgagccagaatggctttgggacagctggttcttattcctgtggcctccggatggcattgtttgcaggaagcgggccggagggttgtctgtgtaggtggagtccagcatcttctccccgttacgctccaccgtgtggcccagtgcgccggggcggtccacaaggccatgtggggctctgcctccccaccccaggacatgcaggagccttcttggtgtttcctggctcccggaggccctggtagctcgtgggtgtgggagctgagcaggaaggtacaaaggctcctgtctgggggaaaaacccagccgtcccgccacgggaaggcgctcggattagggagggggctgggcgggggttggcagctggggatggaagcaccccgggctactctgccctgcacagcccagcctagcctggggtgcctctgtgcagaggaaagactgtgtgccagggcccccaggtttgaaagggggaagttcgcggttgtcactggtactttgttttgttttcccctgtgtctccaccaaaacgaaacgctctgggctgggctgactgatgagtttcccaggcaggcagcccccgggagtgtgtgcaggtacgcgcacgcctgccttgacgtctctagggccgagagtgttttgctcagccccccacagtgagctctgagagccgctcctgcacagacgagagggaacgggagacctgcatgcaggggagccgggtctggacggggtcccaatgggagggccaggtctgggggtgagaggccaaccatgtgtcctgcaggaccgtgcagcgggcaaatggggtgagatgttggaggagctggctctgttcccttcaccccggtgggaggcgaaaccccaagtggtctgtagtgtctggatttactgtgcctgctgtgccttcggacttccttgtgtgtctaggggcttcctgtctgatttgaacctgtctagttcctctgaagaggatgagggagcagcgcctcattgcctgggctctgggcaggtctgggagccaggccgtttgcaggatggcccgcgatggtgcagcactttgtgcagacagattttgtggaattgccgatttgggtttcttcttttcttctcctcctttttaataatacagtaattactctgggctacaaaggaagtaggcgagggtttttttaattgaaagttcctgttgctcatcccaagcttaggggaagccagtatgccagccattaatttggggattggggtagtcctgttggtgtgccaggcacggttgggagggggggcactgtgtcttttggaactggtgggggttaccgcgcgcccgagtggcagactctagcgccccagcagatgcgtccgcagagccactgggacggacggaagctgagcttagggacagccggagttgcttgccctggggcatctggagagggggatcctgttgagcgtttgatgttgcctcctttctgcaccccccaccgagctgccccaggcccccaggggctcatggtccgtcaaggccttgaccgaggcctggcggagggcgggtggtggatggaggcagcgctgtgggtgctgttggggccgagtgccgggcacagcctggcaggggctgcgggcctcgggtggcagtgggcaggccagcatgtggggctggctgactttctctgaacccagaggggacacagggcccatgtgaaggaggcctggcccgagtcctggttagggttgcggtggtggcgggcagctgtgggcttcgtcctcaggtcagcctcaagtcctgtgtccagctagggctcggtggccgtgcgcgtgttgggtcgagctctggtgtcaggcgtgccgggtccgcctcccccatcccgcggatctgcagatctgcaaatgctccgccggcagccacacgagagaacctgttggttggcggcctctgtgcaaggccgtctgagtgaggcctgcagtctggaggctccctaggtcgggaggctccgcgtctgcttcttcctcattctggagttctcgtggggcccgtgctgtggggcttcctgggaagtgggtggagcgcccattttacagatgaggaagtcgaggcctacctggcctgcttgggtagaggagaaggtggtgtttcccgagggctgactcccacacctgtgcttctctggtcacccgccgtgccagtgggagcagtgacagcgaggggtggtggccctgcggccaggggacgggcctcaccgccttccccatcctctctgctggctctgtccagagggctgtgccgccctgtgactggcacgtgggtgcagccgtctgctgggtgggtctgtccgggagcttgactggcctggctgggtgggggggggtacccctttgtgctacctcagcgagggctcaaagtgagggtctgggaccaccagaacggtgtattcaatgcactgcgggcagccctgcagcgggcagggattgagtgaggggtggggcctgcctggctcctggcaagcacccgtctggcgggcggggcccagtgagcctcctccctttgccgggtcctcctgtagtggggcaggaacctctagcatcccacccttgctgccctttttctgccccgctcaccacccacatcaacttgtcaccagcaagggcatgggacaaagcaggacatgccccgggtggccagcgtgagctagctgtgcccaggagcattgcccatgctgtcccccaggcactgtcctgaagccctgctgggttctgagtcctccaggctccgcggccccttctcgccctgcccagagtctctggccaccaccgctgcttggggccctgcaccagcctgtgcgcccgcaaggttgccagggcccctctgcaggtgcagcgtgagctgtgtcctgggcccacaggggagccgcttctcagacccccgggctggccccaggctcccccggcagcactcaggcggccctggcccccggtgcggctgactgttcggggcacgcgtctgaggtgtggggatcatctcccccttgctcagagcccccaacgtgtcccctgcacagggaatcggggcagccccctgccagccctgcccagggatccctcctgtcaccctcaggcgtgctcctgggtggcccagcggcctccctgcaccgtgaggcccgagacagtttcgcgtgacatcatgttgaaaacagccagctctggccgggcgcgggggctcccacctgtcatcccagcactttgggaggccgaggtgggcggatcacctgaggtcaggagttcaagactagtctggccaacatggcaaaaccccatctccactaaaaatacaaaaattagccgggcgtggtggcgtgcgcccataatcccagctactcgagaggctgaggcaggagaatcacttgaacccgggaggtggaggttttagtgagccaggatcgcgccactgcactccagcctgggcaacagagcgagactccgtctcaaaaaaaaaaaaaaaaaaagctggttctcccttgatgcgcatctgctgaacttctggggcacgctggggtagagcagtgggtccctccctggagaggccatggggtgaggaccgaagctgtgggtgccaagtggggcaggcagcccagtggagtggggcaagagactctggtctggccggcctgacccgtggggtatgactcttgttacggcagattccatctaggagcggaggccacgcgtatgttcccgggagaggtgggaagtgcatcccgtggcctatcccggggaggtcactcccattccatacctgcagggggagctagctgcctcacgtctgtgtctcaggccgcgcagaggagggggcgcaggtgagggcagcgggaagaaagactgcaagaggctcgggggtcacgggccagggctggcccatcactatttattcgtttatttatttatttatttattttttatttatttattttttttaagatggagtcttgcactgttgcccaggctggagtgcagtggcccgatctcagctcactgcaagctccgcctcttgggttcacgccattctcctgcctcagcttcccgagtagctgggactacaggcgaccgccac[187 bp omitted]gatggagtctcgctctgttgcccaggctagagtgcagtggcgcaatcttggctcactgcaagctccgcctcccgggttcacgccattctcctgcctcagcctctccagcagctgggactacaggtacatgccatcacgcctggctaatttttgtatttttagtacagacggggtttcactgtgttagccaggatggtctccatctcctgaccttgtgatctgcccgcctcggcctctcaaagtgctgggattacaggcatgagccactgtgcccggcctattcatttatttatttagagacagagtctcgctctgttgtccatgttggccaagctggtcttgaactcctgacctcaggtgatccacctgcttcagcctccctcatagctgggattacaggcgtgagccaccgtgcccggccctatcgctatttaaaaggcagagaaaatcttagaggtttttttattgtcaccagcggtgtttcgttgatgcgtaattgcctttggaggcttgaaaaaagttgtgcttaaaggtaatccctcaattatctggaaacttccaccctccagagtgaggcaccccaagtcctggtctggattcgtggacagagtccctgcctgtgaggcctgatggccagtcctctcgccttggccgtggtgcttcaggccctgttgcaggtgggacccgccctccttagggaccttgtttcccaggtgatgctcatgtaatctgcggtgacctctgccccttcccatctgacctctgtccccaggaaagatggcaggcgtgcgagggctcatcctgtccgcggcagttgtgcccctcgggcttctgctccagtggtcctggggcagggcagctggcgctgatgcccaggctctgcctggggacagttcccaggacgggagcctgagggcagcgcacgggaccagcgtgaggacacggactggcccgtgtctgcctctgacttgctgggtgtgcctttgagttcctctgagggtgggtgcgccgagggggatccagctgggccctggccacgtgcaggccagccagagccctggagcctgcaggtgggctgggacagggcttgcgaccgcaggggtggtgtgcgtttgcgctggcgtctgcacaggtgtgtgcgtgctgtgccatcacgctggtcaggcctgtacgccgtggagaggggcgctgtgtggggctcgctgcctgagccctgggtggaccgtggctgccccatgagttgtcggggacctccgctgccccttggacctcgcccgcggccctgggcaatgggtgtggtgacgtcctggggcccccatgagtcagctcgtcctcgtgcccgggcactggcctctccttcctgtgggcgcacagccccggttcctctgaaagcttcgtgggccgggacccgggatgagctggttaaaccctggccctgtgagcaggaggtgtggcttcggggggcggccccgccctgggctcagacttgatcctgcaccggagggagccattctggaaggccgctgccccgggccctgtccctccccctctcatccccagggtgctggc[185 bp omitted]gtggcaggcgcctgtactcccagctactcgggaggctgagggaggagaatggcatgaacccgggaggcgaagcttacagtgagctgagaccgcgccattgcactccatgtgggcgacagagtgagactccgtctcaaaaaaaaaaaaaaaaaacgcaaaaaaaaaaaagatcccgtcacactgacccagctcactgttctcttaccagccttatttcggtgtggtccttagagcatgagccacttttttttgctgggaacataatccacgtttggtaaaattcggcaacgtgtgcacgcaagtggtttttgtacagctgacccttgagcagggtggggtttagggcagcagcccctcatgtagcaaaataccctcgtatagctttcgagtcctccagatgccgctgccgacagcctgctggtgaccagaggcctcgggaggacacgtggtccgcgcacacatacctcgtgtgttgtgttaggtgctgcgttctcacagtgagggaagctggagaccagaacatgtggagaaaagcagaaggaagagaaaccctgtttgctcttcacgcagtggaagtaatgctcatggaagcctctgtcctcgtcgtgttcacgttgagggctgaggaagggagggtgggtctcgctgtctcgggtggcagagcgggaaggagccaggagaggctggcgccctcagggcaacctttattgaaaaaatccacgtcagagtggacctgtcagttcaaacctgccgtggtcaaggctcctctgtgagtgcagccaccacctgtaattccagagtgttctcatcacctgcaaagggagccctggccccatcagcagccagccttccacaccatcctttccagaaccttcccaccttcccaaattgagacgctgtcttcgtgaaacgttcactcccgtgccctctccagcccctggcacccccatcctactttctggctctgtgactctgagggctccagggacctcctaggggtggaatcacacgggatgaggcctggtgtgtttggcgtctctcactgagtgtgacaccctcggtgcatccgcgccatggcccgcgtccgagtctcgctcctgttcgtggctgagtcgtgttccggcgtgtgggtggccacgtgtttatttctgtgatagatgtttgcatggcatccgcgtgtggctgctgcgagcacccgtgtccggttcccgtgtggctgcgtgattcttctgtcaggtggacttctagcggtggaaccgctggtcacagggccactcccggttggaccatttgaggagccgcagacggccatccatacctgcactgtttgggtcccctgccgggttttggggactggatctctgcacagcgacgaccactcccctcttccggtgacttggtttctcctgtccttcggcccgatgcttctctggcctgcagggcatcagggaccctgctgtcctgatccccatgccgtctagaaagccaggggtcctgcatgtgcccggtgtccccactgccttgtcaggcacagggccagatcctgcaccctgtgacgagcacggccagtgggacagacagatggatgtgctgcccgtgaccttcgccacagcgagttcagaggccggaggcatccagtgtccacagagtgaccggtaggccccagccccacaggatcatcgaggtggccctggcctttcgaggccacaaaaatcaacgtttatttttatttattttatttatttatatatttatttatatatttatttatga[131 bp omitted]caccacacccagctaattgtttgtatttttagtagagacggggttt[144 bp omitted]ttggagaacttgaacattacagcaacatctgaagaagatgttctttcacaaacctcagattccaggagatgagcaccgtccgctttccagagaaaattgtctgaggcctctgggagacaggagggggtgcacttagaaacagccaaggcctccttccatgttgggacggacgggccttcctgggctggcccggcctaaatctgctgccgcccaccgaacaccaaggcaccttctcgtgccccagaggccaccagcacccgtccccctgcctccctccagccagtgtcaggtggggacctggccgctggaagggaggtgtcacctgctctggggcatccaggagggaggggctgcgggagttttgctggagaccctccaggtgggggttatggggtatcatggcggagcgtgttgggaagttttcggtgagctgggcgtttattcgccttggtgcccccctagatccctgggtgatccccgtgcccagttttcaggggagaccatgggggtcagagagctggccaggcgggtggtctgtgtctgtcccctgctgttgaaatgaggggaggtgagaggagacgccgtgtgcctggggagg[142 bp omitted]ataccctgtctctactaaaaaaaatacaaaaaattagccgggcgtggtggcgggcgcctgtagtcccagctactcgggaggctgaggcaggagaatggcgtgaacccgggaggcggagcttgcagtgagccgagatcgcaccactgcactccagcctgggcgacagagtgagactccgtctcaaaaaaaaaataaaaaaaatcaaagatgggggcctgctgggaccgtttgatttcttcccattcagaccctgccagatcctgaggctggcccagctgcctgtgtcctctggggctccctgaggaggcagcaccagctgtggtgtgcatgacggacaggggtcccagttggggggtgcagcctcccgatgggccaggatgggggatgcttgggtgccctcaggatgtgcaggctgggcgggaggaagcggtgagagtccacccctccccaccttcctcttctctgctgtttttttttggagacagagtctcactgtgtcgcccaggctggagtgcagtggtgtgatctccgttcactgcacgctccgcctcccgggttcacaccattctcttgcctc[189 bp omitted]gctgttttctgactcaacatcatgaaacaggaccttaagctgagaagtggtgagattggggccatcctcatttccacataaggccgtgttcctgtttactgggggctaggacttggcatgtctttttcggggatagcccaacccttctgtgtgaaaggggtcgtgatggtcactgcaggacagcaagcacaccttggcccctcagtgggcagtgggtgcagggctggacgagggcccagggggcagaagctagtgcgccgatagcgtgtgtcatctgcggcctgtgagcactgatgatgcccgagtggcggagggcgggatgcttccacgtgctcaactttttttttttttcttgagacagagtcttgctctgtcgctcaggctggagtgcagtggtgccatcttggcttactgcagcctccacttcccgggttcaagtgattctcctgcctcagcctcccgagtagctgggattacaggcgtccgccaccatgcccggataatttttgtatttttagaagagaccggggttacaccatgttgtccaggatggtctcaaactcctgacctcaagtgatcttcccacctcggcctcccaaagtgtacgtatctttttagtaacgatatatttgacgatgattaaaaaaacccgatccttgaaggcccttgatagatgctgaggtgagtacaggcctgactctgagggtcatgcgcctagcaggcgtcgcccggtgcacagggccaggagctgagtcgtgcgggactggatggaggccaggggatatagaagacctgggcagctccccaggaccaagccctctcgcctagggctccccggggagttaggccgaaccctgctgtgcccttcactctgcagccctcgtggggatcatcacagaggcaggagctggcaaccgaggtgactgccttcgagtggagggaaaccggggcgggatgtcgcccggcggctcccacacgatgaggggaaaaggcactccagtctgggtggcagagcgagactccgtctgaaaaaaaaaacaaaggaaatgtagaaacgcagcccacccaggttttccacggccgttcatggttacgcttctggaaggacccgtgtcctctcagatgtagcaggattccgatgggagccaccccgggtcccactcgcccccgggacctgccgtgggagctttctttcctggtggggtgcctgactctgcctgcacgttccccccgctgtctgtggcaccacttgggaccggggacccctgcccccctggcaagaccaggtcagctctgcccccgggccacggagcaggaagcagagctgaggctgctgaggtggcgcagggttgctgtgggggcctgtgcgccatgggggcctgggtgggggtgttctcacttcccccggagtctggaaggccgtctttgtgatggatttgatgcagatgtgtccactttgcttttgttgatggcgtctgaggctctggagtccatggcagccttgcctccgtttgcataatctgaattttgggaaaattgcccctatgtggactagttgcagggacagtgccctccgccaaggctgccggtggtgtttgccttatgtgtccggtgctgggtgagtgccagcttttccctggtcagctctgcccgtggccctcacctgtggtctgtgccatcaccagggcgaggctgacctgtgggacggggtccctgcacagcctcgccgtcccccacatccccccaacagggtctggtcccagctgccattgtgcagccttgccccctccccccgcatcagggtccggtcctggccgctgtaccgcgatcacctgtggccctcctgtgttctttacctggactcttgcctttgctgatggcgacctgtgacggctcagctgcgttctcagaggccggctgtcctcgtgggcgtctccggtgcagtcggcgcggtgaggttggcttctgccatggacggggccttctcgtggtgatgacagtcgcccttggtctggtgtctgcagtgctccgaggaccggccctgcccatccctggcgttcactcctcagcttcctcccatggggtgggcggcttccctcctctccctgatttgtggggtgtttctcttttgcacctgatgcgttaaacccattaccggcctaggtcagcctgaggttggtttgtcctggccgcggcagctcctgcgcccctccattgtggagggcgcccttccgtctgccctgcgtcactgggctgggcctggccccgctctgctgtggccctggcactggaagtatgtgctgccctggtgttcgggggctcttgggtcctggggcgctgcaacccctcattttctttccttggggtgcagatgaattggggtggcagggaaccgagcccacagtggccagcccctgcggccccaggtcagagggcagggccggcctggacagagctgcccagaacggtctgcggccgggtccacatgagtctaggtgcctctgagggcactgggacggcggtggcctgcacctgcccagcccagtgaggtccctggcctcccttcagctttgccctgggctctgggctgagggctgtgtggtgatgtcagcccagggactgtgacatcactcagtggagacagtcagagaagggggctcccggggccctccccagggaactggccctgggcccagaccagatggaggaccccgaaaagaacagggcaggtagcagcctgaggctagggctggggaaggggatgggagctgacggggagagagcagccccttgtgggatggctgcaatcccctcgttggcgcccgggagccatccttggcgtgtgacccggagccggcactcgccccctgggacggaatcgtggctgcgtgggttgggtggaggctgggtgaggatcagcgtcccttcgtccctccctggggttgttgcttttcgctgtggccctcaggcaacagggcaggcccccaacccccaggcctgcgtgggcactgtgggtgcccagcctttacgtcctcgcttccttccaggccccggccttgtctggcttcccttgggcaccccctggggttcggagagccccagaagaggccgggctcttcctccttggtgatggacgggtgctgggccctgaccgagtggtgaccgcctccagggagtgatctgcgccctcggaagctgctgagtcttggagtggcggctcttgtttgtgggggcagggggagctgggcacccgccctgtgcccacggaacacagcccagggtggcggccctgcctgtcctctgactgccctcctgctgctgctgctgctgctgcgagggcctcaggcgcaggcggtgactctcggggccactcctgaggtgggggatgtgggctagcggccaccgtgggcggcaggtgtgcaagcagtgctcccgttttccactgggctgcccttcaccggctgtgggtcagcgccccccactgaggctcaggctgaggcgaggctccgcggggtgggcgtgtgccagggtgaggctccgcggggtgggcgtgtgcctgggcgaggctccgcgagtcgggggcagcgcccaggtcaggggcttctccgtccatgtcaggcttagggtgggtgtggctgggccctccctctgctgtccgcccacgaccccctcagaggggctgtcgtgagatgcttggaggcgggatccagccctgagggtgcagggagtgctcagcggacccccgtgccactgctgtcaccggaggaggctgctgctcggctccgggctccatctgcaaagccgggtgtgcatctgtgtggctcagctctgcagggcacagtggggtttgctcccggccggccctgaggccgggcacagggaggccagtgctcatccagggggccagagagaaagtagcaaccccaacctgcctgggccacaacagccaagaccactgtatcagaacagacgccagcggggcagcctgctcgttggccgggcggagcagggtcggcacacagcccgggctggccttcaccccagctcccgacagcgttgggtccctgagtgcagggcctgcccctttctcatcctcctgcctccaggtcatggggcaggggtgccgagaggccctgcgggagccaggacctgagaggtgatggtcaccacccagacgaggggccgggggtcgcacaaggaggcttccagggggatgccaggagcagtggggccctagacccagcagtgggtagacccagcagggcagcgctcacgtcacaggttctgggggttggggcttgtcatctgtgcaggtgcagctgggatggggatttggtgctttttgttctgcaaaagccagaacgcatgtagctgagccaagatcagacggcatggtgcctcatgcctgtggtcccagctacctgggaggatgaggcgggaaaattgcttgaactcgggaggcggaggttgtaatgagccgagatcctgccactgcactccagcctgggtgatggagctagatcctgtctcaaaaaacaaaagaccacgcatcctagccggcaaggccactctgtactcagacccggcagctgtggctgtggcacaggcgcttaccctgcggcattggccctttcagtggttggtgttgaccctccacagaggggctgggtggggtgtgtccagtcccatctgggtagactgagtgttggggatgggagagtgtttaaggaggtggcggttacagactccagcatcgggacacggggccgtgggtcatacccacatccgtgggggctgtgagacagccgtccagaagcttctgtctccgggccaggaggacaccccagagagccccaggaggctcgttccggaatttagggctcagcctcgatgaacctggccaggcggcggttgatgggttaattcagttaatcacacatcactcagggtttctcagcagaaggaactgaccaagccaatggctcacctggaagagagaaggagggaggaggaggggattctgcagagggaaggctggtggtggcgccccccttcgacggtcgtgccctgatgctgcgtggcttaaacggtgccacccggagattggtgggcgggattgggcctctggggtccccggctgtggagagggcaaggcaggggcggctagaaagaaaagcaacctggacgcaggccccacctccctccaggcagccccacaggcccgagggccaccgtgtcaggagggatagcctacacggagagcaggccagtggccctgtgcccaggagggtgccttgcccagcctggaggcccgcaaggatgagaagcagtgtgtgcccgggaggtcacgtgggcaccacagacgaaagtggagccgggggagagatgtcccgggatgcaccaggcgctcgtgcaaaccaagtgctgagcagagagcagcctgggagagaagggggctgccccgagcggcttgggtggccgggcctgtgggagaccttgggtttgctgttaggagggacagtgagcgcaggcacctctctctccacttcatgtttgtcctcactgagggagccgagcagatgcctttgcccctgcaggtcccccatgtcccctcgcccggggcgcgctccacaggctaggccactttcacagctcaccacacaggcagagactggagggtgcgcaggaccccgggtgactgcagacgtgggcacagaggggcctctgagggcgtctggcggcatttgagcagctgccagatctcccctggaaacactggggtgtgtgctcggtgggtgccgtgtgtggggggtatgtgctcggcgggcgccgtgtttgtggggtgggagctaggcgggcgccgtttatgtggggtgggcgctcggcgggcactgtgtgtgtggcacggccactgcttagggccccctggagctgcggggcacacggcagagccagcctcatgtcaccacgtgcttcccccgtgtgcagggaggggttggaggtgtgcgcttgtcttgtccggaagccgggtgttgggacgcgtcctgacgacggcactgcccacatcctaatgggacacctgagggacatcggtggctgagtaaggggcccctcccgagcaggtctggaggcgttggaagcacagcgcagcctcatggggcacctgcctgctctgcctggaattgaggggcgattgggactcccactgcccccaccaaagcctgtgcccctgatgtctgtccagagcacggcttccttctcggtggttcccagaggccgctgggcctcgcttcgtcctttttgggcagcgagtgtgtatgttaggggaacaggagcccggcagggccgtcttgcagggctcagcagtgggggccgtggggttggtgcaccagggcaggagagctgcccggctcctgctaggtgtctagagggcctcagctctcccaggcactgtcccctgtccccccatctcccctgtcccccccatctccccatccccccgtccagggccgcagcagctcagctctcccaggcactgtcccctgtccctccgtccccccgtccagggctgcagcagctcagctctcccaggtactgtcccccgtccccctgtccccccgtccccccgtccagggccgcagcagctcagctctcctaggcactgtcccccgtcccctcgtccccccatccagggctgcagcagctcagctctctcaggcactgtcccccctcccctcgtccccccatccagggccgcagcagctcagctctcccaggcactgtcccccgtccccctgtccccccatccagggccgcagcagcccagctctcccaggcactgtcctccgttaccccgtccaggcactctccccccgtcccccatcccccgtccaggcactgtcccccctccccccgtcccccccacccccgtccagggccacagcagccggtattgagtgtgggtatgagctttggctctgggtcctgagcgtcccttccccaaattccccatgtggcttcccagtctgcatctccatctgctcccagggtgcgagttggtttttgtattaataactgaggtgtgacactcgggctgtacccgctagctgtgtaactcatgcagctcagtgcctttagctcatcatgaggctgtgtctctgtctgtgccatctaatagaggatattttcatcctcatggcgagaagggatggatttgttttcctcgtgaagtcggtgacgtttgcttttcaggtttggttggtggcctccagtctcttgtcctcaacgagggttttggcagctccctctcagtggcctgtgagtgtccccactcccttgtctgggaaagggctggagctctggggctcacagagagggtgggtgtgatgtctttttcctgacgtggcatcggggtgtcttacctgcccggacacctgcctgcgcagggtagcacagaccctacaggctgcggctgagcccccagcacccgccccacctttaatgctcggcccccagcacccgccccacctttagtaccaccctgagtcccccagcacctgtgccacctttagtgccaccgtgggtcccccagcacccgtcccacctttagtgccaccctgagtcccccagcacccgtgccacctttagtgccaccgtgggtcccccagcacccgccccacctttagtgccaccgtgggtcccccagcacccgtcccacctttagtgccaccctgagtcctccagcacctgtgccacctttagtgccaccgtgggtcccccagcacccgtcccacctttagtgccaccctgggtcccccagcacccgccccacctttagtaccaccctgagtcccccagcacctgtgccacctttagtgccaccgtgggtcccccagcacccgccccacctttagtgccaccctgggtccccacatccctggctacacattgtggctcccacaaccccgtttgggttcacggtcctcctgcaggactctcggaactggggagtgagagtttgttccctgctgttgtaaagggcataacctgggggaagccaggcaggcagaaacccccacccacgtccagggccccatgtagggtccggagcttccctgccctccctggtgccagtcctgaccctaccacagccgaatgtctgcgtcagcacaggggcgtgtaggaagaaaaggcgtcctgcttaggagataggtacatccgggacctggggccttctcgccctcagtccacagggaaggtcccccggatggcgcctgccccttccccctccctacccggcttctgcacgcagtcccctgagatggcccacacgtcctgccgctttctggcaggggagagctgaggcctgtgtcttcaggatgctgcctctcgggcagcctccagccctcgtcgagaaaggcaggcagtgtggcgcgagcaggctggcctcaggcggggcctctgggcagtgtcccctcgggatgtttgccgtgctggatctcacacccggctctgacacgctgccgtgtcccccgtgtgcctgcgcctggggtctccgtgtgtgtgtctgtgtacacgcatgtggttttgctttcttgtgggctggaaaatctaatagtagtcagggcgtggtggttgacacctataatcccagcactttgggaggctaaggtgggtggatcacttgaagtcgggagtttgagaccagcctggccaacgtggcaaaaccttgtctctaccagaaatatcaaaaattaaccgggcatggtggcacatgcctctaatcacagctacctgggaggccgaggtaggacaat[140 bp omitted]tgagagggtttccagaagaaggagaatgtccccgtgctggtggctcatccaggtgtgggccggtgtgcggcggggcgtgggcagaggagaggcttcgggctccggtttcctctcctgtggatgcgtcgcccccgcatggtggtcctctgcggaagtccccctgtccgtcccgttggcagccgcagtggaaagacggatggacgggctgtgacagggacagcccagtgtgaccccagccctggccgtcgcggttgtggcattctcgctgtcagggggctgttcccgtggctctcatggctgtggaggggcgtggagggggcggtccccatggccagaacctggccgtggcgggtggaggacttgaggccggctcagtggtcagcgctgctgcttgttcccctacacagaggcgttgggtggagctgcctcaggtatccctcctggctggggtgtgtgcgtcaccctgagtctccagcccatgctgaggagcctcgcaggcagggcccagcagcctatactccaggccattgctgtccgtttctccagaaggccctgctggtgggtggtcccaggagctgggcctcagtgggggatcccaggacagtggagcctgggaggggccccagtgttgaggcgtgaggtactgtctggaactagggggtgcccccaaagcggcacggcgcccagtccctgtgctggaagagagatgagctgcggtggggggtgggggactacgtctcacagatccctctcccagggcacatgaggagattcctcccccaaaacgcccaggaaggaagttaaattttaatatgggtctggtttagagaaactaggttagccatgcgtgggtgtttctggatgtttgggcagtaaggagagtcggtagctcaagaaatccgctggccgctaagcaggggtgaggggcaccgactgccatcccttcttcaaccacggccactcggccacatcagtgtctcctgccacctccctcgtgtccagcatcaacacagcactgcatccctgacccagtgcagtggagaaaactcgcatccaaaaataaaccaggagtcagccaaaaacacgcaaattaaaattacaccctggccaggcgcggtggctcacgcctgtaatcccaacactttgggaggccgaggcaggcggatcacctggggtcaggagttcaagaccatcctggccaagatggtgaaaccccgtgtctgctaaaaataacaaaaattagccagatgtggtggcaggtgccttgtagtcccagctactcgggaggctgaggcagagaactgcacgaacctgggaggcagaggttacagtgagtcgagttcgtgccactgcactccagcctgggcgaaagagtgagactctgtcaacaacaacaacaaaaaaagcacacccccagcatggctgtgcccagaagcacagaagtggggtcaccacagctcacgcctataatcccagcactttgggaggccgaggagggaggattgtttgagcccaggagtttgagaccagcctaggcaacatagcaagatcccatctctacaaaaaaaaaaaattagccagacatgggggtccatgcctgtggtcccagctactcgggaggctgaggcaagaggattgcttgagcccgggagacaagttacagtgagctgagatggtaccattgtgctccagcctgggcgacagagccagaccctgtctcaaaacaaacacaaaagctcacagaagcgctggggtgggtgtgtagaagtcagacccccgggagcggcaggtggaggacgactcggtgcagcagccactgtggagacgacctggtggctcctcaaagatgcacagatctcccatccgacccagcacgaccactcccagctatgtacccaggtggagtggaagcccgcagccacgcagaagcccgtgcgcagacgccgccgtggactccagcagccggacggtggctacaacccagatggccgtcagcagaggaggaggcgtagtgtggccctccatgcactggaacacaacccagccatgaaaaggaagaagctctgactcaggccacggcgtggacgcaccttcaggacgccaggctcaatgagacactccaggctcaatgagacacgccagacacagaggacatgccgtgtgtgatcccatttctatgaaatgtccagggcaggcccagccacagagacagggagtaacgtggtggtttattataaatttttcatgaaaataaaatatacagtactctcgtgagtttattatagcccattgattctttttgtttgtttttgttttgttttttgagacagagtctccctctgtcgcccaagctccacctcccgggttcatgccattctcctgcctcaccctcccgagtagctgggagtacaggtgcccgccaccatgcctggctaatttttttgtatttttagtagagacagggtttcaccgtgtcagccaggatggtctctatctcctgacctcgtgatccccctgcctcggcctcccaaagtgctgagattacaggcatgagccaccgcgcccagcctattttctttctttgaggcagtgtctcgctgtatcacccaggctggagtgcagtggtgtgatctcggctcactgcaaccttcgccttgcaggttcaagcgattctcctgcctcagcctcccgagtagctggagttacaggtgcacgccaccacacctagctaatttttgtatttttagtagggacagggtttcaccatgttggccgtgctggtcttgaactcctgacctcaagtgatccacccactttggccttccaaagtgctgggattacaggtgtgaaccactgcgcccagcctctacaaattttttttttttttttttggagacagaatctcgctctgtcgcccaggctggagtgcaatggcacgatcttggctcactgcaacctctgcctcctgggttccagtgattctcctgcctcagcctcctgagtagctgggattacaggcacccgccaccatgcccagctaatttttgtatttttagtagagacagggtttcaccatgttggccaggcttgtctcaaactcctgacctcaggtgatcccaaagtgctgggccttggcctcccaaggtgctgggattacaggcatgagccaccgctcctggcctacaaaaatttttttaaaaattagctgggcatggtgatgtgtgcctgtagttccagctactctggaggctgaggtgggaggatcacttgggcccaggaggtcgaggctgcagcaagctgtgattgcgccatggcactcctgcctgggtgacagagtgagaccctgtgttaaaaaaaaaacaaaaaaaaaccaggttcaaggtgaaaaggattaagtgttccttgagacgtgtcagccagcattcagacgatctagccaaggtcactgctggaggtggcttttcagggtagaagaaacagccttctggaagaagatgccacccaggactttcctcgtgtggaagaagcggttccctggcttccaaggagaggcccaccctcttcaccctcttgttaggggctaacgcagctggtgacttgaaggtgatgccagggctttttaccattccacaaatcctagggcccacgagaattatgctaaatctactctgtgctctataaatagaacaacagagcctgggtgacagcacatctgtttaacacctggcttatggaatatttgaagcccacttttgagacctattgttcagaaaaaagtttttgtttttttgtttttttttttgagactgattctcgctcgtcacccaggctggagtgcagtggtgccatctcggttcactgcaagctccccctcccgggttcaccccattctcctgcctcagcttcccgagtagctgggactacaggagcccacgaccatgcccagctaatgtttttgtaattttagtagaaacggggtttcagcgtattagccaggatggtctcgatctcctgacttcatgatccgcctgcctcggcctcccaaactgctgggattacaggtgtgagccaccgcgcctggccaaaaagatttctttcaaaatatgactgctcactgacaacgcacctggtcacccaagatccctagtggagacgtacacgatcagtttccggccgggcgcggtggctcacacctgtgatcccagcacttcgggaggccaaggcgggcagatcacgaggtcaggagatcgagaccacagtgaaaccgcgtctctactaaaaatacaaaaaattaaccggccgtggtggcgggcgcctttagtcccagctactcaggaggctgaggca[137 bp omitted]catccagcctgtagcctgtggatcaatgaatgaatgaatgactcggaaatcaagatgactccttgacatgtcattcattcatttatttatgcatgacaaggtgtcccactgtcacccaggctggagtgcagtagcacgatcttggctcactgcatcctccacctcccgggttgaagcaattgtctttcctcagcctcctgagtagctggggctacaggtgcgtgccaccatgcccagctaatttttatattttttcatagggggtttcaccatgttcctcaggctggtcttgaactcctgagctcaaagcagtctgcccgcctcagcctcccaaagtgctgggactacaggcctgagccactgtgcctggccaagtcttagtgtttttgaggcacggtctcactgtgtctcccaggctgcagtggagaagcagaatcacagctcactttagcctccacctcccaggctcaagcgatcctctcacctcagtctcctaagtagctaggaccacaggtgcgcaccgccatgactggctaattttgtttttatttttgtaaagatagggtctccctgtgttgcccaggctggtcttgaactcccggcctcaagcagtctgcctgcgtcagcctcccaaagtgtcggggttacaggcaggagccaccgcagccgcccatgactctcattattgagaaatacatttgtaaggctctaggtgcctgtaggtgccgtggagagcaattcctctgatggagctggggaaattgggtaaattgaaacccccggaaaggctttgccgttctagaggctgtgaaggacacgcgtgatccatgggaggaggtaacatgtcaggatgagcggaagtttggaagaagttggtcccaggcctgaaagatcactgtgagggttcaggacttcagtggaggagggactgtagaggttttagaagcagcaagagaactagaatgagaaggacttggagatgtgactgcattgtcgctgtctcgcgagaaaactttaacacgtgaggagttgcctctgaagggtgagcaggggagttgcttcagttgcgctctagtcccagtgaagattctgtgaacctgggggtaatgaggacaaagaacttggaacagcccggaacctcggttgatgaagccgcggccgggttgagaggaccgactgcagttctgaaagacgttctgctgtgggtaatcaatgctatcagacagcatcacgccccacagagaaatctttcatgaaaggaagagtccatcgctgtggccaacttttttgtggtcatagtttaagaagttgccccagcctccagcagccaccgccccaacgagtcagccgccgtccacattgaggcaagacccttctccggggagattagggccactcccggttcccatgatcattaccattgcttagcagtaaagtatttttatttctttattatttatttaagatggggtcttgctgtatcccccaggctggagtgcagtggtgcgatcatagctcactgcagcctccgcctcctgggctcaaacgatcctcccgcctcagtctcccgagtagctgggaccacaggcttgcacaccacgccccgcttaattaaagtgtgtcctttgattagacacaacgctactgcacacttcctagaccacggtatactgtgaacgtaacttgtgtgtgcactgggaaaccagaacattcgagcggctgttgccgtgcggaacccaaggcctgtgatccccacagggtgtttctggcaccggaacgcaggggccacatccaggggggcagtgcttgtgacgccggtgccttcgtttctgatgtggcttactcagctgggagttcctgtcctaacattttcggcgatggctgtgcacccacggcccctcttcacccgcggcccctacgtcctgccggttggcaggaaacctcttcccctgcacatctggggcacagcagcaaactgtggtcccccttcttcagtgagggtggggcttctgtctgtctggagccctagaatggggccaggggtggctggggcctgggtcagggaggacccggcaggatctgtgcagacaggcaggtggctgcggtggctcccggtgcagggttcttggcctcctgggcgggtacctggcttgagggcgacgaggtgacagccgcgtccctggggttgcaccacccgagcgtccagttaacaccacagctgccacccttcagttctgcaggtggggctcctccctcctccccaggctgcccccaccacccttcagttctgcaggtggggctcctccttcctccctcctccccaggctgcccccgaccacccttcagttctgcaggtggggctcctccttcctccctcctccccaggctgcccccgaccacccttcagttctgcaggtggggctcctccctcctcccttctccccaggctgcccccgaccacccttcagttctgcaggtggggctcctccctcctcccttctccccaggctgcccccgaccacccttcagttctgcaggtggggctcctccctcctccccaggctgcccccgaccacccttcagttctgcaggtgggggctcctccctcctccccaggctgcccccaccacccttcagttctgcaggtggggctcctccctcctccctcctccccaggctgcccccgaccacccttcagttctgcaggtggggctcctccccaggctgtccctgaccacccttcagttctgcaggtggggctcctccctcctccctcctccccaggctgccccagaccacccttcagttctgcaggtggggctcctccctcctccccaggctgcccccgaccacccttcagttctgcaggtgggggctcctccctcctccccaggctgcccctgaccacccttcagttctgcaggtggggctcctccctcctccctcctccccaggctgtcccgaggctccttgctggggaccgtcctgcctcccgtcggggcctgcgctgagactgggctccatgccagccggggctggctggccccctcgctccagagagcgacctgcacagagtcccctcagccatgagcccctgtccagacacggcgtttctctgtgggtggcaacaggctctggggccctcagctctgggctcgggagcatttaaggtggtgcagactcagcgaggggctgtgggctggggtcccaccatcccgggagcagggactgcgtgttccttctcaggaccagaggcttctgtcttttcccctggggtagaagtttgctgcctgccccgtgcccagccttgcttaggtggctgttggctccgctggtccctcaagccccgccattccctcctcagctccgctctgcaccgaaggggatgggtccgacccagcctggcatcatcacagcctcgagtggcgtccagcctgccccgctccaccagtggctgctggagaagaacccgagcctgggtcaggccctgggggctcctgcatcagtgcccggctctccggggcctcctgccctccggcccactctccccgctctcagcatcaaccagtcgccatgggcaggggcagctcggtggctcctgtgtccctgcctcgggcctgcctgctgtcatctgcctccctccctctttcccagagcggccctgggcctggatacggggactgttgtgtggcccctctgtgtctgggggtgcgactgctcccctggcttcaggatcctcagggcttctacccgggattggcagtcatgctctcctggcagtacactctcccacctgtgccacccacccacccacccacccatcccgctttacagaaagccccctgagccctaccctgttcgtccccaggcagccacgccgagatctctggcctctgatgtcatgtgatgtgtgcttcccagctgggttccgggcagggacggtgctcatcatgccccggccttcagagctccttccagcccagcagtctcctggctgtgtcctctgtggcctccgccccgtgtcctcagtggccccgcgggggccttgccggtgctcacctgtgcctctgtttctctgcagctgtgagccgtgagctttgaggcggtgggatgtgtcagcagaatgtctcctgcccccgagagcgaccccgaggccactgagaagagcagcgcggcctggccggcccgaacgcctgcgtctcagtagctgggagccacgggcccacgcccgcccaccggccgcagtgatgttctagccacagaggagccaagacctcaggtttccagagacttgggatttgcacggcagcagagtcaccgtggagaggccagggtatcacaaacttatggattttgacaagaaaggagggaaaggggagacggaggagggccggagaatgtccaaggccggcgggggccggagcagccacggcatccggagctcggggaccagctcgggggtcctgatggtgggccccaacttccgcgtcggcaagaagatcggctgcggcaacttcggggagctccgcctaggtgaggccctgctcggtggtaggtggggtcgggaggctgctggcagggccgccccgagtcaccggagcctctggtggggccgcccggggtcactggagcctctggcggggccgccccatgtcactggcaggtgcgttgaatcatcagtccgtcgtggtgcgagtgccacttcccttcgaggaggttctgtggggagagtgggtttctggccctgtcaccttttcgggaaacagttctgttgggaggcaggtggcccagagcaggccaggccacgccgcaaggagcccgatgttaagttgtgaatgactttcatggcccatgtgcacgctgggcgaagccccggctttaacggcaggtgcctgcccggcactcagctcgtgggaggtcttggccagcccggagctggcgtcaggtggctggagtgactgttctgtggtgatgatactgctgtgtgccactcccagcttcaccatgtaaaaggccgcacctggcccacctggctccgtcccttctgctcacaccaacctctcccgggtcggggtctgattgcccgggcaggcgtgaggagcagggccgaggactgagcctctcattggccaggggtgccttccctggggtgggggtgcctgaagatgaccatcaggcctgggggagctctgagcacctttggggccgttcccagtctgtgattagctgggccagggagctgaatcatccccggaaatgtggttaaatttattgctggtgctgccggagctcctgcgggagggcatttggcgtctgttgctggggttgtccggggaacccaggtgcacccccagtcagtgtctgtcgtggtgggaatcagggtccctgggaaagagcgcaggatgggcaggtccgagaggccacggcagtggatcggcctcacgtgggcacccatggcaggcggtgcccatggcacccatggcaggcactcagcccgatgaggttgtcagatgagggaaacaggcccacgcagtggtcatgatgtggctgcatcttcaagagcggccgcccaggggcgcaggagcatgggctgtggcggcctggaccccaggcatgttttgtggccctgcttcccacctcctgcctcactttacccacctgttaaatgaggatgaatggtagttgccactcgtgggcagaagggttcagcaggcagttatgcggcagaagtgtgtgtcctatgagtcaagcagcttctcccaggcgagggcagctgttggggtcactgttggctgtttctgtgttcccattggttgcacccagggccccaggaggccggggtttgagaccccacccgaaccagatcccaccccagcccttggggaggctgctgggattccacctctgcgcagaggctgggcttgggccacgaagcctcactgccggtccgacggcctgtggctcaggaggcccgggctccgtttctcagccaagagactgagcttttcccaacaggagctgtggcctcccaaccccgtgtgtgtgtgcacgctcagacacacgtgcagacacatgcagacatgtacacacgtgcccacaaatgcacatgtgcacactaaagcacacgcacacaggcgcacacagccacaaccacgcatacacaggcacacaggctcatctgcacacacatgcctggcacagccccgtgacctgcagcctgcggggtatggcttttgggaacccagatggctatgtgggtcctgtccttgggcggcggttgcaggctgctgaatagtgcaggtccctgtaggcagatgagagtgacgtgggtgatgccagctttttttttttttttttttttgagacggagtctcgctcggtcacccaggctggagtgcagtggcgcaatctcggctcactgcaagctccgcgtcccgggttcacgccattctcctgcctcagcctcccgagtagctgggactacaggcgcccgccaccacacccggctaatattttgtatttttagtagagatggggttt[141 bp omitted]cttcagcctggcattttgggcgctgtgtgcttcgcgggcagccgcacatcgtggtttctcaggggtgccgggaggccgtccatcggaggacacaccagcccttcttcatctgctcccagcgcagggacgcttggctgtttctggatttgggcccttctgaatagaactaactgcccaaatagaactgaatagcactgggctcctcgagcactccacgtccccagcactcaggactgttggtggctttgatgttgagcctgttgtggactccggttgttgaatgttgttccgttgtctagaatgttctagaatgtgtcgttttttctgtttttaaggtttttatctttgatttaaaatattgactatgctctccttagatgaggctttctgtttttatcctgcttgggatccactgacttcttggatctctgtgttggtactttttcaaattaactttggaaaaatgtgagccattatttcatgaaacgtttttccatctcagctttgctttgctttgttttgttttgtttttgagatggagtttcactcttgttgcccagcctggagtgcagtggcaccatctcggctcaccacaacctctgcctctcgggttcaagcaattctcttgcctcagcctcccgagtagctgggattacaggcgtgagccaccatgcctggctaattttttatatttttagtagagatggggtttcaccttgttggccaggctggtcttgaactcctgacctcaggtgatccacctgcctcggcct[136 bp omitted]tcccaggttcgtgccattctcctgcctc[224 bp omitted]gctggagtgcagtggcgcgatctcggctcactgcaacctccgcctcctgggttcaagcaattctgcctcagcctcccaagtagatgagattacaggtgcctgccaccacgcccagctaaatttttgtatttttagtagagacagggttttgccatgttggcaaactcctgacctcaggtgatctgcccgccttggcctctgaaagtgctgggattacaggcgtgggccaccatacccagccttgctctcattcctgggttctggttctgcgtgtgacaggagtgcttggccctgtccccaggtccctcagccctggctgttttccgtctgcctctgtgctctcctggtgtcaggctgtgcggctgctgctgctgctgcttgaaagtttactctttttctgcagcctccaaccccagaagtccatgtggtgaatctttgattgcttagtggcatttttcggtttcgtctgattgtccattcgctctcagctgagatttcccatgtgcacattcactttggccatcttttcctttaaatctttgaacatgtttgtgctgtttcttagtccattttgtgctgctgtaacagaatgccacagactgggtcatttatttttatttattatttattattttttgagatggagtcttgctctgttgcccaggctggagtgcagtggtactatcttggctcaccacaacctccgcctcccgggttcaagcaattctcctgcctcagcctcccgagtagctgggattacaggcgcccgtcaccacacccagctaatttttgtattttcagtagagacagggtttcactgtgtgttggttggctaggctggtctcaaactcctgacctcgtgatctacctgcctcagcctcccaaagtgctagggttacaggcatgagccactgcacctggccagatcatttataatgaacagaaattgatgggctcaccgttctggaggctggtgagccccagattgagggtggcgtctggcaaagaccttcttgccatgtcatggcaagaaggcatggtggaaggcaggacggcacagaccggagggggctggattcgccctttagtcaggaacccactcccctgctgatggcattcactcatccacgagggcagcgactcagatcctctctctaggccccagccccagccccagcagtgctggattggggaccaggttcccaacacatgacccttggggggtgcatcaaagacacagcactgtgtggagtgacgtctgtgctgcttcttcctcccttgtcacggtcacacctccctcactcacctgtgggacagcctcactgggcgtggccgtggtgtgtgccgtgaggtgtggagggtgccgtctcccggcttgagcgctgagtttgtccccgtggctcaccttgtttctgtcaggttggtttcagcgttgctggggcaaggctgagggtaaacatgagcgactccaaggccagggagccctgtgccaaggtgtggaccttttgggttctcagctgaagtagagaatccagggaggaccccgcactccggccattggagctgtggcgtcctccctcctgtgtgtcccccggaacctcctgagcctctctggagctgttctctgccaggccccgtgggctctcctgccctctgcatgcatcgcgagtactgccggaggaggcccctttggctttcagagcccagagcgcccgacctcctccaggagtctgcagatccacaggcctcagatgctgccacacccacccagcacacacccaggtctctgacacgccagccgcacacagcggtggggttcaggcgaaggtttcttccacagtgcagagtagaagagccgggaaggaccccatcaccatcagatgcatcagagcttcaaaggcccgcccatcaagacgctgccaagagcatgaggccagccaggctggggaggacgttggcgagcatccgcctgcccgtcagggagccacagctggatgatacatcgacagacagcagagggacggtgtagcacacaggcgagggcttgtcctcctcagcctgggggagcgcagctcagtgcttggtggtcagcacgtgactgacactttgccggagaaggggacggctgcccgcaggaagagctacacagccgtgttcgccggaactccgctctggagagtcagaactggagacgggagggcgtgcctcaagggcagatgggcaaaccaaaccccatcctccctgtgagccgcggcacagcaccaggcgggcacacgcagcacgacacggcgaggagcccaccgcaggggcagccttttgggcggggaaggggggatgaatccactgtgaatcccacctccgaagggcagcgcaggaaggacacgcaaatgctggactgaacctgcagctgattcagggggcagtgtcctgagctctaaaacttcaaacctggggcagtgtcctgagctctaaaacttcgaaatctgaccaggcacagtggctcacgcctgtaatcccaacactttgggaggctgatgtgggcggatcacctgacgtcaggagttcgagaccagcctggacaacatggagaaagcccatctctagtaaaaatacaaaaattagccaggttgatggtgcctgcctgtaattccagctactcaggaggctgaggcaggagaatcgcttgaacccaggaggcagaggttccagtgagccgtgatcgcgccagtgcactccagcctgggcaacagaacgagactctgctccaaaaagaaaaaaactttgaaatccctctaaaaataaaatggaccggtggatggtagctgtgaggatggaccgtgtggcaggtttagttctggggcctcggcaatgagtgttgggtgtttggggcacggctcctgttgttttacgaggagaatttcctaataacgtgttacactggggagaacgtaggaggggagcccatttgttctgaaaacgcggggaccagccctggtccccggctcaggactggaggggttgccctggtccctggctcaggactggagagaccagccctggtcccgggctcagggctgcagggaggcacctggtcttccctcgtcctcacgatcctgcaccctcaagatgccacgttgttgaggctgtttagggaacttgacaagctgattggaaactgtgctgaaatagagcccaggtagtgatgcggacagggcagtgccagaaggagccccagcgattcctgtgctgcaaggcacgcccaggacggggcactagccgggggaagaggctctcagggcccaggtgggaccccagcctcagactatgaggtcatgactgtgtacagctcagccaccgggctttgggactttgaatccaccttagcagggtttccaaacccattgtctccacggccaccctgccagtccagctgcagcagggcggaacaaagtggaggcctctttcttgctttctttttttttttttttgagacagagtttctctcttgttgcccaggctggagtgcaatggcaccatctcagctcaccacaaccttcacctcccgggttcaggcaattctcctgcctcagcctccctggtagctgggattacaggcatgcatcaccatgccaggctaattttgtatttttagtagagatggggtttctccatgtttgtcaggctggtctcgaactcccgacctcaggtgatccgcctgcgtcagcctcccaaagtgctgggattacaggcataagccaccgtgcccggccacagaggcctcattctgcagcgtatgctactcgggcaaaggcagctgactgcagacccaacacggtgacccagctggatggtgcctgagagacggggctgccccacatggtgccctgtcatgccgcgggacaggtcgcccagcagatggtagctatggccccagtgccatcctgggctggagacacatgggtgccagacacgttcatgcctgtcgtctggcccagctgccgtggggagccctccagggccgtgtgcctgcagggaccggcctgttcacctctaggctcacccctcgggtgctgagtcaccacagtgggtggggccgtgccccctcccaggccggcttccacagctgcccctgcagagcgcctctgtgttaagggctggccgcctccttcctcagggggtgtaacatgtaaaaagctgcaccctggcctgtacaggggctcccgcctgttatcccagccctgtgggaggctgaggcaggcagatcgcttgagctcaggagttcaagatcagcccgggcaacttggagaaaccccgtctctactaaaaatacaaaaattagttgggtgtggtggtgcgcacctgtagtcccagctacttgggaggctgagatgggaggatggcttgagcctgggagacaaaggctgcagtgaactgcgatctcgccactacactccagactgggcaacagagcgacaccgtctcaaaaaaaaaaaaaaaaaaaaggttctgggcctcgtaccttctgcgctttcatgagactcagccctggaagtcctatgtggctggtggccccagggaacaggacctgggctcctctcttctaacccatgtgggccacaggtccctgtccatctgtgctggggctcacctgggggccgagggcctcgggcatgtgggagatttgtctttgagaaaggggtggaggagtgtggagcccttggggctgcctgcaggccgtgagagacctccccagtgccgcttctgtcctgggctagggaggtgggggggcgggggaggaggagtggcagacactgaggcggtgaccacacgggcagggtgcaggtgtcgggatgacttggcaggccatggtgcagtgctctggcaggctgggcccaggccctgctgctgggcagtggtgtcatttggagggtggtccttcagggaccccctcctgcctcctgcctcgggggtgggctggggaggtcggggctaggtgggccctgcgctggcggtgctgatggtctctgtccccgcaggaaagaatctctatacaaatgaatacgtggctatcaaattggtgagtcggcccctccaccccacccccgctgacgtgccccccagggatttcagggcagcgacccggtcccctggtgactcgctcttgtgcccccaggagccgatcaagtcccgggccccgcagctgcacctggagtaccggttctacaagcagctcagcgccacaggtaccgggcggcccgcgggtggggcgggggctgcgcaggggcagggagggggctgccgccgcacgcccgtgcgtctgtcctccgccgcagagggcgtccctcaggtctactacttcggtccgtgcgggaagtacaacgccatggtgctggagctgctggggcccagcctggaggacctgttcgacctgtgcgaccggaccttcacgctcaagacggtgctgatgatcgccatccagctggtgcgcggcgggcggggcggggcggggctcggagggaagagggtggccctggaggggagcgcgtgggacggggaggggcccggccgacaccgccgtgcccccctgcagatcacgcgcatggagtatgtgcacaccaagagcctaatctaccgggacgtgaagcccgagaacttcctggtgggccgcccggggaccaagcggcagcatgccatccacatcatcgacttcgggctggccaaggagtacatcgaccccgagaccaagaagcacatcccgtaccgcgagcacaagagcctgacgggcacggcgcgctacatgagcatcaacacgcacctgggcaagggtgagctgcgcgcgcgcggcggggggcgggcgcccggaccccgctgaggctgcgcccctgtccccgcagagcagagccgccgcgacgacctggaggcgctgggccacatgttcatgtacttcctgcgcggcagcctcccctggcaggggctcaaggtgggcgaggaggccgggcaggcgggcggggacgcagggcgggagcaaggctgaccacagacccccgcaggccgacacgctcaaggagcggtaccagaagatcggggacaccaaacgcgccacgcccatcgaggtgctctgcgagaacttcccaggtaaggggtccctgcgcccccgccctgtgccccccaccccccaccccccacccccacccccgccgaggccccgctggcgctctctctgcagaggagatggccacgtacctgcgctatgtgcggcgcctggacttcttcgagaagcccgactatgactacctgcggaagctcttcaccgacctcttcgaccgcagtggcttcgtgttcgactatgagtacgactgggccgggaagcccctggtaggtgggggggtgccggtatgtgggagcgggggaccgggaaactgccctgagggagatgggaaccggcgctgcagcccatcctgacccctgctccctcacccacagccgacccccatcggcaccgtccacaccgacctgccctcccagcctcagctccgggacaaaacccagccgcacagcaaaaaccaggtgaggcccgggcgggaccgaccgccccagggaggggcatgggcggccagcgtgaccccctactgcccccaccaggcgttgaactccaccaacggggagctgaatgcggacgaccccacggccggccactccaacgccccgatcacagcgcctgcagaggtggaggtggccgatgaaaccaagtaaggctctggggcggtgccttcggggaggtgggggtgccctgggtccccatgggggtgggagggcctgaggcctgggctgcccccgccctgcaccccggtcctcctacctgagccactgccctcctcagatgctgctgtttcttcaagaggagaaagagaaaatcgctgcagcgacacaagtgaccctgggcgcgtgcagccccctgaatcttctccgtgcagccccttggggcgcgaccttgtgcgaggccctcggggcccacccacagcggcccagggccagaccctggctggaagccagaacgcagactgcaggggccgcgcctggctcaggcggccccacccccgggacgtggggtcacttccttcatgtaagactttggccgaaatttctacacctgtgtctagtcctcccctccaagagcattaactatttaaaacaaggaaaagaggaaaaaaaaaacagaggcccgccctaccccactcctgcccctccgtttctttgctgaagtgagtagtgtgatcctggaggccccccggcctggccccgccccgccagccgcccccgttagcgtcataaagtccagcttgtctccctcgatccaaaggccgttttctcgaggggagggcaggcccggcctggaggggtgctgtggagctgtcttgcccaggccctcctgggagggggacaggcattgttgccaggggtgaggccgtgccccaggcctccccgaaaccaaaggggaaggcaggggtggggccgtggctgaagccggctccccaaccaaaatgctgcaccaaagctcgggcgccgcgggcacggctgctgcagtctcttcccagcctggccctggcaaggggcgggtgggcgctgccaggcgggtgcttctcgacgcacttgctcccggaggctgcgccccggcgcctggaacccgaggtgggaggaccggttggtgtcaccctgctcggccctcagccctgccgcgtggggcgcgtgggcacggagcttcctgcctctctgctccgacacccggcaagcagccggagacaaaacgccttaaagcccccggcccagccctgcaggtatattgcaggggcctgggggcggccctggactggcgggcggttccccagtggggtgccctggaggctgccgggcagagtggagcagcttggggccgtgcccagggcggtggctgtgagtctagtttttgctttaccaagtgtacagaaatggcatttacgtttctctgatgctcccttgaagccatagaatttaggggcttttttaaaaaaataaaagaaaaatgaaaccaaacccaagtgtagagggatttgtctgggctttccacgaagcttgacctggaacgggcgttgcttccatccccatcctgcctgtccgggacgagtccggagcggctggcggcctccggtaacagaaaccgactgatgaggcggaaggtaaggaagatggaagcagagggcagagctgggctctgtctggggagagggcaggagacgagtgttcacgtaccatggaaaggggaagtcacacacatgcgacttggccccgggggtcccgttccccgacactacacaaatatacctgaaagcctcagcgacggggcccaggcaggatggtcctggctgctctgacggcggaaggcctccttgactccctctgttcacgcagcagggcagaaaacatctccacgggggccacgacactgtgaagggaatcagcagtagctcccagaagaacagcggaaactgcaggcaggtgaagaccttggcagcactagccccggctccgccccgtgccttctccccagacaacaccccatacccggcagcaagggtggaagaccagtaccaccgtaatatgttgtgacaaagcagaaataatgcacctgtaagagtcagatggcaagagggaaatggaatgagctcatcgatggttttcccggcagtagcttggggataaggactacttgtcatgtgctttatatatttacccacatgttaaccttttctgatgctcttcatt[132 bp omitted]aaccctgtctctactaaaaatacaaaaaattagccgggcgcctgtagtcctagctactggggaggctgaggcaggagaatagcgtgaacccgggaggcggagcttgcagtgagcccagatctcgccaccgcactccagcccgggcgacagaatcccaaaactacctctgggataattttcagcctgaagaacttcaatatttcttacagtgcagcttttttttttttttttttgagacagggcctggcctaggctggcgtgcagttgcacagtcatagctccctggagcctccacctcttgggctcaagcgatcctcccacctcagcctcccaagtatctgggaccatagacgtgcaccaccacactcagctaattgttttgttctgttttgtttttaggtagagatagggttgcctgtctggctctgttgtccaggcacttgcggaggacgaggtgggaaagtgaccctgggatgagaggcgtgagccaccacgccgggccgagtgcagctttgtcggtaacaaattacaaattagcatttgttccctgaaaaaaatatttatttcacctttcttaataaggatgtttttgctggtagtggcattccaggttgacaaagtgtttgtttgggacagagtctcgctgtcacccaggctggagtgcattggcgtggtctcggctcactgcagcctccacctcccgggttcaagcagttctcctgcctcagcctcccgagtagctgggattacaagcgtgtgccaccacacctggataatgtttgtatttttagtagagtcggggtttcaccatgttggccaggctggtcttgaactcctgacctcaagtgatccacccacctcggcctcccaaagtgctgggatgacaggcatgagccagcatgctccactgacaaagtttttaaaacgcggcggctcacgcctgcaatcccagcactttgggaggccgaggctggtggatcacaaggtcaggagatcgagaccatcctggccaacacggtgagaccccatctctactaaaaatacaaaaaattagccgggcgtggcggcaggcacctataggcccagctcctcgggaggctgaggcaggagaatggcgtgaacccgggaggcggagc[138 bp omitted]tcatatagcttgagtctcattctctctctctccttctgggactccacttacacatacgttcaaccctttggctgtgtcacgtatctcgatctgttctgtttttccattgtttttactcactgtgcttcaccttgcatgtttgtttgtttgttttttgagacagagtcttgctgtgttgcccaggctggagtgcagtggcgagatctcggctcactggcaagctccacctcccgggttcacgccattctcctgcctcagcctcccaagtagctgggaccacaggcacctgtcaccacacctggctaatttttgtagttttttttagtagagacggggtttcatcatgttagccaggatggtcttgatctcctgacctcgtgatctgcctgc[132 bp omitted]tgcaacctctgcctcccaggttcaagtgattctcctgcctcagcctcccaagtagctgggattacagatgcacgccaccacgcctcgctaatttttgtatttttagtggagacgggtttcgccatgttggccaggctggtctcgaactcctgacctcagatgatccacctgcctcggcctcccaaagtgctgggattgcaggcatgagccaccacgcccagcctgtcatttttaaatggatgctggacgttgtaaatgacagatggtagaagctggtgctgatgtttcttcacagggctgtgttttcttttggcagggtccagcgtaacagcagcccagtgagaccctaccagggttttgttttggagtgatgacggcttccgttctgtcctccccacaggagtgttgccctagctcctggtgggtggcccttctggtgtcttcattagaagcccaaggtgtttccttttaatatgtatttttttagagatggggtcttgctgtgttgcccaggctggtctcaaactcctggcccctagcagttctgcctcagcctgccaaagtgctgggattgcaggtgtgagccagcacgcccggcccccagggtgttcgacaaggccccctaccccgccagcctccatctccattgcctgctcccagcactgcgcactgtggagatctgctcagccttcagcctcctggcaactgtttgcggctggcttttttttttttagacggagtcttgctttctcgcccaggctggagtgcaatggcaccatcttggctcactgcaacctccatctcccaggttcaagcgattcgcctgcctcagcctcccaagtagctgggattacaggtgcctgccaccatacctggctaatttttgtgtttttagtagagatggggtttcaccatgtcggccaggttggtcctgaactcctgacctcaggtgatccacccgcccggcctcccaaggtgctgtaatgacgtgtgagccaccacgcggccttgctgccgggtttcttgatgtcttgccctgcacgtgtgctcctgaggcagcagccaacggcttgacttctctggccactgaggccacaactgggcactccctgctttctctccatctctcacatccacggtcccccagcagccagcagggcctccccacggggaaatcggcacacacgtccattgcatttgggtttggggggaggtgttgagttagttagggtcttgctcttgcccaggggggagggcagtggtgcatcactgctcactgcagtctcgacctcccgggcttcagtgtggcctgtgggtacttaaggagggtctcgcagcactggcgaccagacccggggttcagggcccctctcggcgcacgacatccctcgcccactgcagcccggatgacagggcagagagtgaaggggagcaaagcagtgtgcgctcaaggcaggtgcatttgtttctttatttaaaaaaatcatctgggggcatggtctgaggaggacacccctcccatggctttggggaggacgcaggttccaggagtcacagggcagaaacacgcggggtgggtgggggcgtggccggagtggggaggggctgtgcccccagcacctgggggtggctcccacggcaccaggtgggctagggcaacagtatgtacaggcgagcagtgctcctggacccggtcggggccggctggggccccattctgcggcaggggagctctggggcacagggtctgagtcccatcttgggctgcagggaccgcgagggccgtccagggaggctggacagcgggggcctttatctgggcccatcaggtggatgagaacggacactgcaaaccgctcaccacctgggccagggctaggcctatccggcaggggccgtccccacactgaatcctgcgtgcgcagaactcaagccggcatccaggcagtgggaacgccccgcaggctgggcttgggtggcctcgggcacgtgacaggtggggcccgtgtcctgataaacggacaggaacaaaaggaacgcaaggtctgggacccacggctctgggagcagcgccacccaggctggctcctagcagagaaatgggaatcgcaaatgcattgcaatgtgcagtgaagagacgcgagggacgcccgcggcgcaccgccggcagacgacgtgggcaggcgccctgagctgcgggtccgtgggccctggcccaggccggcacagccctgtccctagtcctgagggattgtctccacagggcctggccactggcctggccacctccccggctgccctgatccagcagccacactcgtggtgaacacagggcaaccccgtcctgatgctgagaaaggtggcatggagtggacagacggcctgggggacactgggcctggcaccgcgtggtgggggggccccagcagcagatgatggcctggggctgcggctatccccacggagggagggcggtgtcggtgtcgggcagcctaggtgtagaagatgacctcggggatctggccgtcctccacggatgtgccattgttgttcccggccgcgtagcaaaaggtgaagcaggtcttggcgcccgtggtgggcgactcgtgtgtcaccttgcgcaggcctttggtgccgtagtgggagtctgggccctgtagggaataggggtacagtgaggtcaaggaccaccaggctgggatgccccaggtgtggacagggcaaggccccgactgggccagggtggctgcctctggagagtgtgtgctgtgccccggtggcttcaggatgggccagagactcccacggagggacccctgtccccggcggcgcaccttgagcgtggcacaggccgtgtagttgacgttgggcagcacctccaccggctccttgaacatgacgcggaaggtgctggctgagccgtcgcagctgaagcccgtgtcgttctggcccaagacggtgttgctatcggtgtgaataatctgcggggaggtgggaagtgggaggctcaggcctggggagggccaacggggacccctcgaggcccagcccacctgcccagggtgggggcagcacagggaccagggccgggggttcagccagggttccatggaggtggagagaggacatgggcctgagtggggcctggggatgaggcttggggctggtacctggatgttcacttggtagtcggtgggcccgtggatggatccatacagcccaaatcccaccacgaagatgcgcttgttgactgagaacctgccgtggcagatgacaggcagcagcgtggatacccagggatagcctaaggtgagctggggcgagcccacccccatgcccggtcccctccatcgtccctgagtcctccacccccatgcccggcggcccccccgccgtcttcatcatccctgagttctccacccccatgcccggccccccatctccgtcatccccgagtcctccacccccatgtccggacccccccgcctgcaccccaagccccacctgatgcggtcactggtcccgctgtagccccagcgactctccacctgctggaagcggttgatgctgcactccttcccacgcaggcagcagcggggccggtcaatgaactccactcgtggcttggggttgacggtgaagtgcaggaagaggctgaccacctcgcggtccaccaggatgcccgactgtgcgggacctgcagcacagggagggtgtgggggagggccgggctgcaccccaggatcccgagtgcctgggaggacacgctccttccccctaagatgtctgcgtcggactttcaaggtgcagggacctgggcagcccctccccgggggactagccaccagccatggcccctgctgcctgggcttttagggagaggtcccagggcacagaccagaggccgacagatacgctcactcaggggcgatgcctcagggtctgacagatgcactcactcaggggtgatgtctcagggtctggccccactgtagggaccacccgtcacttcactgtgggtgggggcggggggctccactgcctgttctctcagggccattggctgggaggggtcactgtggctccctgctaggcctgtaccccccaggctgcagccctggcttctagaagcagtctgggggttcctctccacggtgggccctaggcagacaccttctcaagcgcttacacccccaggggtgatggctagcggaccccaggcagactccaagagccaggctcttaatcccggtgcagagatgtcacaggcagagggactgtgcatgggatgtgaaggggctctgggtagggaggggaggccaggaggggcagaattgggggtccaccatccacccccaggagtgccaggacacagcaccctctgctctaatgagagcagccctgcctgcctgagacctaatcactcatcaaccaaggtgggctcaactccgcatcgctcagctgcaagccagcccagtgcagacacagtttaataactggtgagaaacagaccattatgggttaagtgaatcaggaagactgagtatcaaaactcaataaacaatgttaacaattttttttttttttgagacggagtttcgctcttgtcccccaggctagagtgcaggacggagtttcgctcttgtcccccaggctagagtgcagtggcgtaatctcggctcaccgcaacatccgtctccagggttcaagcaattctcctgcctcagcctccagcatagctgggtttacaggcatgcgccaccatgcccagctaatcttgtatttttagtagagacggggtttcaccctgttggtcaggctggtctcaaactcctgacctcaagtgattccccccatcttgggcctcccaaagtgctgggattacaggagtgagtgacccagcctggccaacaattgtatatatttttttattttaaatggagtttcactcttgttgcccaggctggagtgcagtggcgcgatctcggctcatcacaacctccacctcctgggttcaagtgattctcctgcctcagcctcccgggtagctgggattacaggcatgagccaccacacccagctgatcaacagttgtatttttaagaagtatgtatctagccaggctcggtggcccatgtccataatcccagcactttgtgaggccgagatgggaggatggctggagcccagttcatgaccagcccaggtgacatagcaagaccctgtccccacaaaaaaatacaaatataagccttgtgtggtggtggcacctgtgatcccagctactccggagtctgaagcaggaggatcacttgagcccaggaggtcgaggctgcagtgagctgtgattgtaccaccgcactcagcctgggcgacagagaccctcttgctaaatctggcgaccttcagctaagcaagagcgggggccgcgtggacctggggaaggccagacggcgagtgtgcaccagccccagggctctgtcccagccccttctggaaagttccaggcctgttttgctccagagctggatggcgtcaggcagtgagcagccacgagggcaggaggcatcgttagcgctgccccttcacgtcaccctggaacccaggccctgcagcaggggaccccaaggcccactcgggcgcatgacagccaccccggccatgtcagagccctcctgagctcgtcacagacactggtacctgcaccagcaggtagcacaagggcgcgagacggggactcccttccctcctgggaagatgccaccaaaacagctggacagacacgagaggcggggtctggcagtgtgcacggtggggacagagccgggccggggctaacagatggccctgtggacgcgtcctcacaagccaggtttcttcctatctgtatatgccaggcatctgccaggctttccgcagtgaactcgggggcactatcctcggtacccagatgcccacctgtgtgccactcccctcccaaaccagcccctgagcccgagctctgttacctgcagcgaactcctcgatggtcatgagcgggaagcgaatgaggcccagggccttgcccagaaccttccgcctgttctctggcgtcacctgcagctgctgccgctgacactcggcctcggaccagcggacaacggcattgaacagccgcacctcacggatgcccagtgtgtcgcgctccaggacagccaccagcgtgtctgtggggtggaggaaggggctgcgtgaacacgacacccacatgcccaccctgcaggaggcagtgagactaacgtgaggaccagcagttaaagccgggctggcaactatggcccgtggcccaaatctggccctgtgagtgtgtttataaataaagctttatcaacacaagaccacgccccttcattttcctcggctgtggttgtttttaagccacaaggacagacttgagtagctttgacaaaagctgttcaacagcaaagtcaaagccatggaccatcggaggacgagatggtcaccatcagctgggatggtgggctctggcctgtggcctcctggccaaggccccggactcccgtggggctgtgctaggacccaaactcctgacctgctgcaagtggtgaggccccagctcacctgtgcaactcccccaggcccaaagctcccactgtcaatccccggaccctcccgccgaggccccgctgggattcccacacctgggctcctgggcccttacccaggtcaatgtcggtgaagccctccgcggtgatggcgtctgcagtgtttttgtcgatgttctccaggcacaggctggccagctgcggttcatcgaagagtcgcgcctggcaagagacatcgacggggggcgcggtggggacatcagcacccagccctcggcagatccccagtgcggggccggttcaaatgcagccctgaccacacgggccttcctgagcgtggccaggagccaccagggtctcagccaccaggccggccctgttgtgggcccagagactcccctgtgaccgctgactggggcgggagagttggggagttccctctcaggacctcagaggccaaggaaggaagaaaaagatgctcaggtccctgtcggcagggcctgctgctttaggcaaaaggggcgttgcagctgcactcggggggcagcagggcccaggaccccgagtggcaggcagaggtgaggtggccggggccgaccggtgaagcttcccgaccacaacatgcccttggccacttgtggtgggaggggccgtgtccccggcagctccatcccaagacaaacagcagacatgacttctgacagtcaggtgacagagctggaggacgcctgtgctcttagggaaacagaggcttagttagtggaaggtgctggaagggcctatgccagcagggacccgggcaggcctttctgcgggcatcctcccgaggacacctctcaagtgggttcgtagtggttttaggggcagggaggctgaggcagccacaagatgaagcccggggagtgagctccagcctcctctcagctcaggcagaggcctctccagcaaggcgaccagatgacccggacaagaaacccctccctgtgggagtccgggatgccctgcatctgacctgccaggatggagggggagaaggttctgggtcctttccaggatgccggacccccaaagcccattggaggacccagtgccgctgtcccctctggccaccctccacccccgaccaggagctcacggctcccaagcggccgtccacccgtactggccccacgtcctctcagcctccctggcctgcacgacctccccagcccccgccctttgggctgcacagagcccaactggggtcccctgagatccctggccctgctctgtctacctgacatttccttagagagagagagaaagttctctctggtttttttttttctttttttttagccaggcgcggtggtgggggcctgtaatcccagctactgtggaggctgaggcaggagaatcgcttgaacgctggaggcggaggttgcagtgagctgagatcgtgccattgcactccagcctgggcaacaagagaaaccccgtctcaaaaaaaaattattttactttttttttagagacagggtctcactctgtcactcaggctggagtgcagtggcgccatctccactcactgcagcctcaacctcccgggctcaggcaatcttcctgctttggtcccccaagtagttgagattccagacatgcaccagcgtgcttggctaatttatgaaatatttttttttagtagagatgaggtttcaccatgttggccaggctggtctcaaactcctgacctctggtgatctgcctgtctcagcctcccaaaatgctgggattacaggcatgaaccacagtgcccggcctgaatctttttttaattttttgtagaaacggggtctctctatgttgcctaggctggtctagaactccgggcctcaagcaatcctccctacttggcctcccaaagtgctggggttacaggcgtgagccaccgcaccctgccaataattttttgaagtatcacggaaaagtccaaaacacatctttttttttcaggtggagtctcgctctgtcatgcacgctggagtgcagtggtgcgatctcggctcactgcaacctccacctcccaggttcatgcaattctcctgcctcagcctcccaagtagctggaattacaggtgcccgccaccacgcccggctcttttttgtgtttttagtagagataggatttcgccatgttggccaggctggtctggaacgcctgagctcaggtgatctgcccgcctcggcctcccaaagtgccgggattacaggcgtgagcaaccacgcccggcccaaaacacattttactaccaggcaggagcctgctgcctcccgggcccgcccccggccccgcctccgcctccagcctcggtccgccccaccccggccccgcctccagccaggcctggccccgcccccgcctcgtaccggccccgcccacctgcgtgagcagcatgaaggcgttgtcggctcgcaggttcttcttcaggaactccacgcaatgggcctcgagcgctggcaccgcgtacttcttggcggtgtatagcgtggtcatcaccgtctccgggccaatctgcacctcgtccgagtagagaaacctgcagaagcaacgcgggtggccgtgaggtgggaccgccatgcccgcccccaggggagagcgtcaggggaccactcagaccgttagactcggccaccggcccttgagctggcaggacccaaacacccacatcaggttccccgaggaaccttccagaattagcccctgtccgttgccctctgacatagggacacgacttggcaaggtggtcacccatgaaaacgagcaagaggctgaacccatctacacagcacacacccggaagcgtctatatggcctgtcttgttctgcccgggatgccccaggagagggcactgggagctgggtgtctccttcttgggcaccttttccatgaggaactgttggttccccacctcgggcaccaccgaaaacctcaaccacttctgggtggatcatagaacccaacacgctaattaggatcatggataatcatggacgctattaccacctgccagcgaggggcccacacgacactgaatacagatcagaagttgggccgatcaaaaatagaagcacaggctgggcctggtggttcacgcctgtaaccccagcactttgggaggctga[134 bp omitted]gaggcaagagaatcgcttgaacctgggaggcagatgttgcagtgagctgagatctcgccactgcactccagcctggagacagagcgagaatccgtctcaaaaaaaaaaaaaaaaaaaaaaaaaaaaaaaagcagcacaggccggcctggtggttcacgcctgtaatcccagcactttgagaggccgaggcgggcagatcacttgaggccaggagttagagactagcctggccgacatggcaaaatccccctctactaaaaatacaaaaattagccaggtgtggtggcagacacctgtaatcccagctacctgggaggctgaggcacaagaatcgcttgaacccaggaggcggaggttgcagtgagccaagatcgtatcactgcactgcagcctgggagacagagtgagactccctctcaaaaaaaaaataaaaaataaaaaaatgtctccagcctggagcagtggctcacatctgtaatcccagcacgttgggaggcagaggcgagaggattgcctgagaccaggagttggaaaccagtgtgggcatggtgagatcctgtctctaaacacatttttttttcagctgggcacagtggctcaggcctgtaatcccagcactttgggaggctgaggcaggcggatcatgagatcaggagatcgagaccatcctggccaacatgatgaaaccgggtctctactaaaaatacaaaaattagccaggcgtggtggcgtgtgcctgtagtcccaggtactcaggaggctgatgcaggagaatcacttgaacccgggaggcagaggttgcagtgagccaggatcgtgccactgcactccagccatggtggcagagcgctactccatctcaaaaaatgaaaaaataaaaaaatattttttttctctcccagcctgtgggtggcatttccactctgccggtattgtcctttgaggtatacatttttaacattttccctaagtccaatgtctttgtttattcttttcttggctgtgtctttggtgtcatatccaagtaatcatggtcaaacccaatgtcatgaagatttgattctggtttttctttttttgttgttgttgagacagagtctcgctctgtcgcccaagctggagtgcagtggcgcagtcttggtttactaaaacctctgcctcccaggttcaagcgattctcctgcctcagcttcctgagtagctggggttacaggtgcctgctaccatgcccagctaatttttgtatgtttgtagagatggggttttgccttgttgcccaggctggtctccaactcctgacctcaggtgatccacccacctcagcctcccaaagtgctgggattacaggtgtgagccaccgcgcctagccatactttggattcttttttttttttttttttttgagagggagtcttgctctgttgcccaagctggagtgcagtggcatgacctcagctcactgcaagctctgccacctgggttcacaccattctcctgcctc[349 bp omitted]tgcctcagcctcccaagtagctgcgactacgggcgtccgccaccatgcccggctaattttcttattttttatttattttttctatttttaatagagacgaggtttcaccatgttagccagcatggtctcaatctcctgatctcgtgatccgcccatctcagcctcccaaagtactgggattacaggcgtgagccaccgtgcccagcctggactttgatctatttgagttaatttttatatacagtaaggtaagggtctaacttcattcttctgcatgtgtatttctagttgtgcctgtgctatttgttaaactctcttttctgttgaatggccttggcacccttgcaaaaaattatttaaccctatgtgcaaaggtatttatttctgagctctctgttccattccattggtccccacgttctgtccttacgccagtaccacactgttttgatgattgtagctttgcagtgagttttgaaatcagaaagtatgagccctccaactttgttctttttcaagatcgttgtggctattcagggtcccttgggattccatatgaattctaggatagtttttctatttttgcaaaaaacagtaattctgataggattatactgactgcagatcgcagtgggttgtgtggacatcttaacaatattctcttcaatccatggacatgggatgtgtttccatttattgtgtctttttaaatttctttcactgatgtttccttttttttgttgttgttgttattttttgtttgtgtactccagcttgggcaacaggagcaaaactgtcaaaaaaaaaaaaaaaaagaaggaaagaaaagaaaagaaaaagaaaagcagggaactggctggacacagtggctcatgcctgtaatcccagcactttgggaggctgaggcaggcggatcacctgaggccaggagtctgagaccagcctggccaacatagagaaacgctgtctctactgaaaaacacacaaatgagctgggtgtggtggtgaacacctgtaatcccaggtactcaggagaatcacttgaaccaggaagtcggaggtctcaatgagctgagatcacaccactgcactccatcctgggcaacagagcaagaccacgtctaaaaaatataaaataaaaagggtgcctctgggctgggcgcggtggctcaggcttgtaatcccagcactttgggaggctgaggtgggtggatcatgatgtcagatcgagaccatcctgactaacacagtgaaaccccatctctactaaaaatacaaaaaaattagccgggcgtggtggcacgagcctgtagtcccagctacttaggaggttgaggcaggaaaatcacttgaacctggaagactgaggttgcagtgagccaagatcacggcactgcactccagcctgggcaacagagcgagactccatctcaaaaagaaaaaaaaaagtgcctctggaacccctcattgcacaggaacgttctagaaatctccaccaagccagggcctctgagctggtgtcagacagggtctacgttctctgaggtccccctccccaggcccagctccccagcaggaagcatccggaagcattacttgagcagtgcgaggaaggcagcgggttccacgtcgggcagctcaatctccgtggatgttgtggccattcccccgttgaacatggcatcaaagacggcgctgcccacggccagcacgaacctggtacgggagagagaaggccctggttaagcccgtggccgccaccccacggccgggagggccagcccggtatcctgggtgaccaccccactagggctccctgccagcctccagcaggcatgtaccaggccccccgatggcagaggcttctggaaggggcctgggacagcaggagggtgatgcagacggacccacggcaaggacaggcagggctaggaccatgccctgggccacacagggcctcacgctctgccagccctcaccatcctctctctttccttccaggcgtcaggcacgcactcattcactcattcccatatgcatgcatttattcacacgtgttcattcacacatgcattcacacatacgttcattcatgcatgcattcactcgctcattcacatgcattcattcacacaggcgttcattcactcattcattcacatattcattcattaactaatttccatgtacattcactcaactcatacacatgcactcattcattcatccacacatgcattcattgatccactgattcattcccgtgggcatgcattcacttgctcatttatgacacatgcattcattcactttctcattcatcgcacactcattcactcacccattcacacacacacacattcgttcattcccacatgcactcatccacttagtctcattattcactcattcattcacactcgtctactctctatcactctcctgctcacgcattccctcatcagcacaagctttcccagggagtcagctacaggcacagggcctggcctcactgagggagacagacgaggaccaaatggccgaacagcccccactgagtgagagaagagagaggagcgtggtcccatcaggaacgcaaggcccagggaagccctgtggggtcatctgagccgccacgtccatggggaagggcatggaggcccaggaacagcaggagcgtgggaggagcgttaggaggcagcaggggtggccccagctgggaaagcggtggctgtgaggacgctgggggttctgccccgtgtgaagctcaggctgcctatggggcccactcagtggctcagatcttcgatatcgccacaggcaggagggtgcggtgagcagagaaaggctgctggtgcctccccaagagccggctatgaacccgcgtttggccaggtctgtatggggtggggagaactccacggctcccaggctcaagacgccactctgtgctgtccatgtacagtccccagggcctgcccacacgatggcctcccagggggctgagagcacacacagcataggggggtcacagacactcagcaggggcacagacgctggtggggcgggttcacagacgctcgcgaagtgggatcacagacgctcggcctgcgcgcggcggagcacctgccccaggacgttgcggtccctgcgtcacctcttccccacctgtccccttccaagtctcccaccacagcaagtgccggctctcaacagcctccccacgcccggaaagctccggagctacaggtggttccgcacggatgggacctgcttctcactcctgcacagctgaacctccaggactggctgggcgacctccacacagctcccgggaaagcccccgtcttccgaggagaagctcctcgctctcctcccaccacacgcgcccccctaaaccccgcaggccctcagcccacccggtccagcccagggcttgactgcaccccagagtcaggtcagaaaccaacgcagtggcttccacatgggccccgaccacagcttccacatccgccccgaacctcggaatgcgaggcccggcggaaacaggccggtgctaactccgtgagtcaggacgaaggcgccggggaaggctggccctaaacagtggctggtgtttttggaaggaggagaaacaggccgggcacggtggcccacacccgtcatcccagcatgtgggagaccaaggcgggaggatcgcttgagcccaggagtttgagaccagcctgggcaacatagtgagaccccatctctacaaaaacattgaaaattagccaggcatcgtggtgagcaagtgcaatcctagcgactcaggaggctgaggcaggaggactgcttaagcccaggaggtcaaggcttcagagagccaggactgcgccactgcactccagcctgggcaacagagcaagactctgtctcaaaaaaaaaaaaaggccaggtgcagtggctcacgcctgtaatcccaccactttgggaggccaa[134 bp omitted]gaggcaggagaattgcttgaacccgggaggcggaggtttcagtgagccaagatcacgccattgcactcctgcttgggtgacagagcaagactaaagactccacctcaaaaaaaaaaaaaaaaagaaaaagaaaaaagaaacagagtgggcggccgcatgaagcagggactggagcgatgcggccacaggccaaggacgtctggagtccccagaagctgggtggggcaggaggatcctcccttgagcctccagagggagcgccgccctcggacgccttgatccatggtcctgggctccgggactggcagaggatgaacccactgagtttgacccccccagtgtgtgggcattgggactgccgcccgcccgtctgccctcctggccgcgtcctcaagggcccaggcctcagggccctgcgccatcacccacagctggtgccccaggacaaacgctcccctcccacacgatgttccagaaatagagtacctgtgcgtgggacttctctttcttgatttaaaaatgtatcttggtctcctgtggggaaaacctttgaggagggttcaaaagcagaaagcaggaggcactcaagtgggcccggcgtgggccgtccatgcagtttggaatcagggagcacctctgacatgggcgggtccccaggcagctctgccggtccccaaggcaggggctcctccaacaccgagcccctccctggagacacctgcatgggccttcaggattcgacccctgggcaccgctactgcctcctctgcccaccgtgagtccccagccccactcccggctgttccccccttcatgtatctgtaaccccttccccttccaaacaaatcgagaacacacggccacacaaaaacacatccacaattgctcacagcagcacgattcccaactccgaacgggggaaacaaccagcgtccattgacagacacggtgcgaccacccacgcactggaacacgacccagccacaaacaggaacgaggctctgatgcaggacccggtgcagatgcgccttgaagacgtcgtgctctatgacagacgccaggcacagaaggacaaatcctgtgtgatccactcctaggaggtccccagagtcctcagattcagagacagaaaggatgggggacgggcacagtggctcacgcctgtactcccagcactttgggaggctgaggcgggcggctcacctaagatcaggagttcgagaccagcctggccaacatggtgaaaccctgtctctatgaaaaatacaaaaattagccaggtgtggtggtggacacctgtagtcccagctactcaggaggctgaggcaggagaatcacttagaacccaggaggcaccgggcacggtggctcacacctgtaatcccagcactttggggggc[132 bp omitted]ggcaggagaattgcttgaaccctggaggcggaggtcgcagtgagctgagatcgtaccactgcactgcaccctgggctacaagcctgagactccatctcaaaaagaaaagaaaacaggttaaagaccgaaagaattgtgtggtgcacaaagggccaatgattccgtgatgtaatctacgcaatgcaacgtccatgaagagccttaaaccacagggctgaacctccaagctggtgactttatccacgtgccacgagggtggccgtcccgagcccacaggacacaggtgcaggtgctccgataccctctggacatgtgaacctcttcatctggctgcaagatgtccttgctgtttttgtgttttgagacggagtctcgctctgccgcccaggctggagtgcagtggcgcaatcttggctcactgcaacctccgcctcccgagttccagtgagcctcctacttcagcctcccgagtagctgggactacaagcatagcaccaccatgcctggctaatttgtgtatttttttagtagagatggggtttcaccatgttggccagggtggcctcgaactcctgacgtcagatgatccgcccgcctccgtctcccaaagtgctgggattacaggtgtgagcccccacgcctggaagagatgtcctttattaaatctttcatttatttttatttcatttttatttttagtttttacaggtgtggtctcactctgtcacccaggctgaagtgcagtggcacgatcatagctcactgcagcctcaacctcctggactcaagcaatgatcccacctcagcctcccggtagctgggaacacacacacaagccacaatgcccagctaactgttaaatgttttgtacagacggggtctcgctatgttgcccaggctggtctcaaacccctgggctcaagcgatcctcccagttcagctgcccaaagcgctgtgattacaggcaaactgataactgtatttctcgaagttctgtaagctgttatggctaattatcaagctcaaggacggagatgtgggactcctgattttagtcagagagaagtgtgggtcacctggggactcgcccctgcaacaggcatctgacgtgggtggcacggggctcagctgaccacctgtggggtctgtgctcactctggatggtgggtgtgagggttgagttaaattgtaggatgccgccgggcacaggg[131 bp omitted]cgtggtggtgggcgcctgtagtcccagctactcgggaggctgaggcaagagaatggtgtgaacccaggaggcggagcttgcagtgagctgagattgcgccacggcactccagcctgggcgacagagtgagactccgtctcaaaaaaaaaaaaaaaaaagaaaaaaaaattgtagtatgcccagtttgtatctacaagatgaggaatcacttgctgtggaaaacccacacacagtgccagaactcctatgaggagtaaaaacagattttcctttatatccaaacagaaaccatgagagctggagtggctacgtcaacatcaaaagaaagacgccactttgggaggccaaggcaggaggatcgttttagcccaagagctgaagatcagcctgagcaatgtagcaagactccgccttgcctacttttct[132 bp omitted]aaccccgtctctgctaaaaaagtacaaaaattagccaggcatggtggcgtgcacctgtaatcccagctactcgggaggctgaagcaagagacttgcttgaacccaggaggtggaggtcgcagtgagccaagattgcatcactg[138 bp omitted]ctaaccaacatggagaaatcccgtctctactaaaaatacaaaattagccgggtgtggtgatgcatgcctgtaatcccagctattcgggaggctgaggcaggagaagaatcgcttgaacccgggaggcggaggttgtgatgagccgagatcacgccattgcactccagcctgggcaacaaaaacgaaactccgtcaaagaaaaaaaaaaaaaagagaaagaaaagaaaagaaaagaaaaaggaatctctggaccccaaaatcactactccaaagggaaaaatcaagctggaaccgcttagggcaaaccagccttctgttctattccttaaaaagacagctaccaagataaaaaagctacatacctccctcccaatctgtccacaaggaaattccttgcagacaaaggacagagagaactcagccatccctccgctcaccgagataaatgcgtatctgattgctgcctttggaaaggctcatcagaaactcaatgcaatggtctgtttcttacctatgacctggaagcccctcccagctaagagtttcccccctttctggactgaaccaatgttcattttacatatattgattgatgtctcatgtcccctaacatgtataaaaccaacctgtgccccacccaccctgggaacataccgtcaggacctcctgaggctgtgtcacaggcacacatccttaatgttggcaaaacaaacttttttttttttttttttgagatggagtttcactagtgttgcctaggctggagtgcaatggcatgatctcagctcaccacaaaatcacaaaatctgcctcccgggtgcaagcaattctcctgcttcagcctcccgagtagctgggattacaggcatgcatcaccacgcccagctaattctgcatttttagtagagacggggtttctccatgttgttcag[131 bp omitted]tattcagggttcacataacaaaccttcatatataccccctgagtcgaaaataaaatcaggccaggagcagtggctcatgcctgtaatcccaggacttcgagaggccaaggcaggaggatcacttgagcccaggagtttgagaccagcctcggcaacatagaaagaccccatctctacaaaaaaaaaattattatttttttttagatggagtcttgctctgtcacccaggctggagtgcagtggtgccatctcggttcactgcaacccgtctcccaagttcaagcgattctcctgcctc[222 bp omitted]accgcggtttgtttctgcactcactggctggtctgcgggttttccggttttgagctactgtgaatcatgctgctctgggcattcacgcacgaggctgtgtgaggacacagattctccttctcctggataaatgcctcggagtggaatgaccctgacgtttaacattttcttttttgaggcagggtctcactctgtcacccaggctggagtgcagtgctatgatcacagctcactgcagccttgacttcctgggctcaagtgatcctctcacctcagcctcctgagtatccgggactagggcgtgcaccaccatgcctg[137 bp omitted]tctcctaaaaatacaaaacgtagtcaggtgcagtggccggagcctgtaatcccagctactaaggaggctgagacaggagaatcgcttgaacctgggaggcagaggttgcagtgaaccaagatcacaccatcgcgctccagcctgggaacaagagcaaaactccgtctcaaaaaaaaaaaaaaaaattattttttagccaaagcagtggctcacacctgtaatcccagtgctttgggaggccaagttgggaggatcacctgaacccacaagttcaagaccagcctgagcaacacagcagaccccatctctactaaacagaaaaaaatcagccgagcatagtggtgcatgtctatagtcccagctacttgggaggctaaggtgggaggactgtttgagcccagaagctggaggctgcagtgagctatgatcgagccactgaactccagtgtgggtgacagagtgagaccctgtctctaaaaaaaaaaaaaaaaatttaatttttaaaaagtctaagagtccaaggggtcaatactagacacacatggctatttaaatctatatccaaattcagctgaattcaacattcaactcctcggtcacactgtccacatctgtagtccgtactggcacatgagtgcctagtattggacagcacacatccaaaccatcccgcttactacaggatactctactgcagagcacaagaccacagaaaaactgttaaacctaataaggcttcaggaagaaacagttcaaaccagataaaagtaaacatgccagctactcgggaggctgaggca[137 bp omitted]ttagaaagaccaatctcctcagtaaattcctttatcacttgacaaactgattctcaagatcatcaggcaccgttagcccagggctggcaaactatggcccttagagtgaatctggcccaccacttgtttttgtaaattaagttttttttttttctgagacggagtttcactcttgttgaccaggctggcctgcactggcactacctcagctcactgcaacctcctcctcccagattcaagcgattctcctgcctcagcctcctacgtagctgggattacaggtgctcaccaccatgcccagctaatttttttattttttatttttttgagacggtctcactctatcgcccaggctggagtgcagtgacgcgatctcggctcgctgcaacctctgctgcccaggttcaagcaattctcctgcctcagcctcccaagcagctgggattacaggcgctcgccaccacgcccggctaatttttgtatatttagtagagatggggtt[142 bp omitted]tggccaggctggtcttgaactcctgacctgaggtgatactcctgcctcggcctccgaaagtgccaggattacaggtgtaatccactgcacctggccaataaagttttattagaacacagctcttcttgctcagttacatgttgttgatttatggctttttgtgctgctacggcagaattaagtagctgcaactgagacagtatggcctgccaaaaatatttactatctgacccttcacatgaatttgctggcacctgtgtcttttatctgttttggttttgttttacacacagtcaaggtctcactatgttgcccacactggtaccaaactcttggcttcaaaagatcttcccgccttaggccagggacggtagctcacacctgtaatcccagtactttgggaggccggggatagcctgaggtcaggagtttgagaccagcccggccaaaatggcgaaaccccgtctctaaaaatacaaaaattagccgggtgtggtggtgcacacctgtaatcccagccactcgggaggctgaggcaagagaactgccgggaacccaggaggcagagctttgcagcgagccaagatcatgccactgcacttcagcctgggcaacagagcgagactctgtctcaaaaaataataaaacaaaacacagaatataagttccataaggaaggagatgtttttctgtcatatgcacctcctgtagccaggactgtatttcagtgagtatctgtagggtggacagatgggtggatgtgggtgactgattctagaagagtaataaatgtgtcagaccagctgagaaagtctttttttttttttgagacagaattttactctttttgcccaggctggagtgcagcagcacgatctcagctcactgcaacctccacctcccaggttcaagcaattctcctgcctcaacctcccgagtagctgggattacaggcacctgccaccacgcctggctaattttgtatttttagtagagacaaggtttcactatgtttgccaggctgctctcaaactcctgacctcaggtgatccgcctgcctcagcctcccaaagtgctgggattacaggggtgagccactgcgcccactctttttttttttttctaggtggagtctcgctgtgttgcccaagctggagcccagtcgtgcgatctcagatcaccacaacctctgccacccaggtttaagcggttctcctgcctcagcctctcaagcagcaggtgcaagccaccatgcctgggtactttttgtatttttaatacagacagagtttcactatgttggccaagttgatctcgaactcctgacctcaggtgatctgcccgccttggcctcccaaaatgctgggattacaggcgtgagccactgtgcccagctttttttttttttttttttagggacagagtctcactctatcgcccaggatggagtgcagtggtaggatcatggctcactgcagcggcaacctcccaggctcaggtgatcctcctacccgagcctcctgagtagcagggaccacaggcacacaccaccatgtccaagtaatgaggtctcgctatattggccagactggtctcgaactcctggggtcaagtgatcctcccacctcagcctcccaaagtgctgggattacagatgtgagccactgcactcagcctgaaaagtcttcacaaagaataaagttgggaagaatttggtgagcagttctcaaaacataccacaaagcagcaatcatcaaacaatgtgttatgggaacaaggactcacaaagcagtcaatgaaatgtgagaccccagaacacactgttcttttttttttttttccaagacagagtctcgctttgtcacccaggctgaagtgcagtggcacaatcctggctcactgcaacctccgcctcccaggttcaaacgattatcctgcctcagcctccccagtagctggggttacaggcgctcgccaccacgcccggctaatttttgtggtttttcttttttcttcttttttgaggcggagtctcagtctgtcacccaggttggagtgtggtggcgtgatcttggctcactgcaacctccgcctcccgggttcaagcaattctcctgcctc[222 bp omitted]tccatgatagagtgaataaagatacgttaggctgggcgcggtggctcacacctggaatcccagcactttgggaggccgaggtgggtggatcacctgagctcaggagttcaccatcaccctgggcaacatgacggaaatactgtctctactaaaaatacaaaaattagctgggcgtggtggcgcacacctgtaatcccagctactcagaaggctgagacaggagaattgcttgagccagggagctgaaggctgcagcatgcggagatcacgccactgtaccccag[152 bp omitted]tgaaaccccgtctctactaaaaaatacaattagccaagtgtggtggcgggtgcctgtagtcccagctactcgggaggctgaggcaggagaatggcatgaacctgggaggcggagcttgcagtgagcggagatcgcgccactggactccagcctgggcaacagagcgagactccgtctcaaaaaaaagaaaaaggtattttagatactaacttcatgggaccagccaatgtgcacatctacaaaagtgcaaccctggagatcttcagttctcccttcaagccccatgagagaatcagatgtttaattcccacagatcattcaatgcacaatcactgcgtgcctactgtgtgccaggctccagcgcgctgagatggacgggtgcccatccaggaccggggaacagcccagaagccgcgtgcaacccctggcctcctccccagcacaaacgccgacccctgcgcgacggtccagacactggggccaccaccaaggcctgctcccagcctcctctctgccatgtctcagctcaccctgcacccccgccagggaccaggcccaagcccaggccacttgctctcctcacagctggcaaggcccggcccctctctgctcatcggtgaactccagactttatcccagcacccccagttcgtcccgacatccccccaccttttttttttttttgagacggagtctcgccctgtcacccaggctggagtgcagtggcgcaatcttggctcactgcaatttctgccttccggattcaagccatcctcctgcctcagactctgagtagctgggattacaggtgcgtgccaccgcgcccagcttatttgtgtatttttagtagagacggggttttgccacgatggccaggctggtctcaaacccctgacctcagatgtctgcccatctcggcctcccgaagtgctgggatgataggcgtgagccactgcgcccggcctcagctgctgttttctttctctctgctgtgtggcctgtggctgtcagcaacccatcgggtccgtttgttcccacagccccaggacagatgtgtctgagtgaccttgtttcaatcatggaaactgaggcacagagcacttgggacacactgctctgcggacctctcagccccaggtcccgccaacacatccaagccagtacttgtccctcctgagcctgtcctggcttgtgatgctccagccagaagtctggggacccccaccacagccccccacgccctcacctgccaagctgcctcctctcctggccacaggaactcgcttcctccaaagaggacctgcatcctctacccctcatttctgccgtccccaccgagcccgctgctgtctcctgcctggagtctgcagctgctactccccagcctcgctcctgggcccatccacggcgcgttccaccctcaatgcggatctggtcacactgggccacagggcctccctcactcctcctgctccggccttgccatggctcccacctgcccagcccctctgggctctgggccttccatccctgagcctggggcactgcactctccatcaacatcacttgctcagggggtcgttctggaccaggtcagtgccccctctccattttcaaccctcctgaaatgctaaggaaacacagatgacctttcaacaaggcaggcttcaactgcacaggtccactcatatgtgaattttttcaataaaggctgccccaacggtgccggcctctcctgcctccccttccacctctgccaccccggagacagacccaccctcctgctcctgctcctcagccctcaatatgaacacaaggacacaggccttcatcgtggccacctccactgtgtgaacagcaaacaggatttctccttttattttttttccttttttttttgagacagagtcttgctctgtcgcccaggctggagtgcagtagcgcaacctcggctcactgcaacctccgcctcccgggttcaagtgattctcctgcctcagcctcccaagtagctgggactacagttgtgcaccaccacacccggctaattttttgtatttttagtagagacggt[148 bp omitted]gggctggagtgcaatggcgcaatctcggttccctgcaacctccacctcctgggttcacgagattctcctgcctcagcctcctgagtagctgggattacaggtgtgcgccaccacgcccggctaatttttgtatttttgtagagacagggtttcaccgtgttgaccaggctggtctcgatctcccgacctcgtgatctgcccgcctcggcctcccaaagtgctgggattccaggcgtgcgcccccgcacccggccccttagacttttctgaatgtattttctgttctccagcctgttattgtgagaacaggaggctggtgtgcattgaccaagtgtcctcacaaggcctccggtcagcgagaagccattcctagttaagttcgtgggagtcaaaagttgtacttggatttgagctgagtgggggtccacgcccctaaccccgcatgtcgagggtccgctgtcccaggcccgcccaccttaccttgctgctatctcccgctgggcctcattgccctctcctgagccccccgggggcagacccctcacctacttttctccaaggggtccttgtcctgcctccatcttccccactttgcaaccgagccagcggtccctcaagtgcaatcgcatacatgtcccaaggtcagccggtgcccggggcgccccacctcccccctcaaacagaaagcctgggattctccagctgcacctgctgctgggtgagttccagctgcatccaacctaccccctccccaaagagcacaaagaccacccaggtggagggagcaaacccaccgcccctcactccaagctaggagaggcccagcagctaaggacgacagagacagggacggcgacacggacggcacaagccgtaggaggccccggaaccctccaggggcaggaacctctgctaagtaccgcccagggcaggaccccacgaaaggagacccagctgcccataaacacccaggaagaagccagaacacgttaacaaaagcacccgaaggtcagaagggagggcaggaccctccccctccagtgcccgcagcaagaaaacccagcccctgcccccgaccaatgaggggcagggtaagagggaccggggagtggagggaacctggggcctggggccggtaccccgcacactggcaaagacagatactgggccaaacccacttctttcccagaaaggagggctgggggctggggagggagggaccccggagctgggggtctctgggttggaagggcccggagatgggagtctgggcaggggtctagggtggtggcctggtggcaggggatcataggatggggtgcagggggtagcagggcccaggggagacaaccttctgcagagtccagggtccagagcctggcagtggcggagctggaggtgggtggtcactgaagtgggaggtggcagggcccaggggtctctggctgaggtgggggtccggggctggaggggctgtggatggtagtctatgatctggactgcagggcgggcagggggtatccctggaggggagcagcatggtttgaaggtctctgatccagatcatgtgctgagcctgggggtctccggtgggggtcactgggtctggaggcagcagggaggacgcagggagcaaggcctaggggtcttggcgcacaggggtgcgggtgggagtggcagggtccctggatggtgggggaagagggaggggtcttgtggtcatgggtgggggtggaggaaatagcacgacccctgaagggaggggtcctggagttcaggagtcataggttgggggttacggactgaggtggtgaggactggggacggggggtctcaggtgagagcggagaagtctctccatcctgggatgcaggggtgacacacttgagtgtagtggggtcccagggggccccgggagtagagagtggaagggcagtgggcaggggtgaaggacctggggaaggaggggtcctggagagtccctgggtacagggacggaggggtcaccagtaggggtcccagggggagaggggcggcaggcaagggtgcagggcctggggatggaggggtcctgaggatccccgggtatagggatggaggggtgtggcatgtggggtcatgggtcctagaaacagtgggttggggtcctgggaatggaggagcagataggggtacacgtcccagggttggagggtcacaggagtcccaggggtggtgggtgggggtgcagggccagggcatggaggggacccagggatgcaggccaggtggggtccagggatggaggggcctggggtgtaggcaggggttccagccggaggtggaggggcccagggatctgggggcagaggtgtctggggacctggggtgcagggaggggtgaggtccagggatggagcgtcctggggatggaagaatggagggtcctagggtgcaggcggggggtggagggccctgaggatggggtattcagggttctggggtgcgggctgggtggggtttgaggatggaggggcccaggggctccaagtgcaggccgagttggagggtcccaggaacggagggtaccggagtgcaggctgggtgggtccagggacggaggagagcaggggtcccaggggtacagggcctgggatcccggggaacaggctgggggcgcaagccagaggtggaggatccaggggggcctggggatggaggggtgcagaggcccagagtgcaggcctggtggggtctggggacagagaggtgcagaggcagggacagaggggtgcagagcccagggaactgggtggagtctagggatggaagggtgcaggccccggggtgcaggccgggtcggtttcaggaccggaggggtgcaggggtcccagggacagaggggtgcagggcctcaggtgcaggccccggggtgcaggccgagttgggttcggagcctgaggatgcaggggtgcaggggtcccggggacagaggggtgcagggctcggggatggaggggtgcgggggtctcggggacagaggggtgcagggcctcaggtgcagggcccgggcagcaggctgggtgggtcggggccagggctggcggggtcggggcgcccacctgtgcgcggggatgcgctgcgagctgagccccttgcccaccaggaagtgcacgtcgcacagcacctcgttgttgaagaggaaggcgaagcgctcctgcacggtgggcttgctggcctgccagttgtacgcggcctcgcgctgcagcgccgccgcccccgggcccgccgcctcctccgcccgctccgcgcccgcggcctgcgcgtctgtcccggggcccggcggggcgggcggcgtcggcccaggggcggcggcggcggcggcggcggcggcggcggcggcggccgcgttgccgggggccggggtggcggcggcgttggcgctgggcccgggactgccccccgtgcccgggccgaccccgacccccggcgggcacgacgcacgcccgccgctcccacccgccgccattttgtggctgcggcgtgggcgggggaggggaggagggaaggagggaggggaggagggaaggagggaggggaaaggaggagagtagggggaggagggggaggagggaggggaggggaaaagaggagggaggggaaaggaggggaggagggaggggaggggaagcgggaaggagggaggggaggagagggaggggaaaggagggggaaggagggaggggaggagagggaggggaaaggagggggaaggagggaggggaggagagggaggggaaaggagggggaaggagggaggggaggagagggaggggaaaggagggggaaggagggaggggaggagagggaggggaaaggaggggaggtgggaggggaggagggaggggagaagggaggtgaatgggggaggctgttgcaggggaggggacggggaggagagggaagagtaggaggggcctgtagaggggaggagctggtggaagacctcttgctccactccctaagcatcctgacctgaagcccagactccagaccgaggtccagaatttggggtccaggcaccaggccccagactccagaccgggaatcctaaaccctggagcacagacctcagtccgggatcccaggcctcagaccttgaatcctagatcccagactctgaaccccagacttcagactccggattccagatcccatacctcagacccggaacccccaacccaaagaccaagcgcaaactccagaccccagaccccggacccaggtggcgggcctgctccgtggcgcaggctccgctgtacagagacatagcctgaggccgggaagctgcggatgagcgagcaggatgcaggccacgtgcactgacactcagcagacgcccagcaccctctccaggccaggtgtggggggtggtcagtgtggacggagctgggactcccccaaaacgcttactacatacataatgtcaaggtagacaaatgccacaaagattgaggaaccaggtcgggcgcagtggctcacgcctgtaatcccagcacttcaggaggccaaggcggggggtgcatcacctaaggtcaagagttggagaccagcctgggcaacatggcaaaa[134 bp omitted]gtgaaaccccatctctactaaaaatacgaaaattagccaggcttggtggcgggtgcctgtaatcccagctactcgggaggctgaggcaggagaatcacttgaacctgggaggcggaggttgcagtgagccgagaccgcgccattgcactccagcctgaacaacaagaacaaaactccgtctcaaacaaacaaacaaacaaacaaaacaaaacaaaaaaaaaactaggcgtggtggtacgcacctgttgtcccagctactcagaaggctgagacggaagcatcacttgagcctggaaggttgagcttttgatgagctatgactccaccactgccctccagcctgggcaacagagcaagatcctgtctcgaaaaaaaaaaaaaacaaagaagaaaaagaaaatagggtattaaaaaaacccaagtgataatgctattttcagttctccagagtgggtggttgaggtagttacaatttttttttcttttttcttttttctttttagagtctccctctattgcccaggctggggtgcagtgatggcgatcttggctcactgcaatctcagcctcctggttcaagcaattctcccgcctcagcctcctgagtagctggggttacaggtacccgccaccacgcctggc[135 bp omitted]gcctcccgagtagctggaactacaggcgcctgccaccatgcctggctaattt[132 bp omitted]acaacctccgcctcccggattcaagcgattctcctgcctcagcctcctgagtagctgggattacatgcaccaccacgcccggctaattttgtatttttagtagagacggggtttctccatgttggtcaggctggtctcgaactcccgacctcaggtgatccgcctgccttggcctccccaagtgctgggattacaggcgggagccatcacagccggcctctaaatgtcaactttcttatctctcatctcatacatttgcaaagtgacatctttccagccaaatcctaaagaggacatctgtgcagtcccttctagatgaaggtgcagaacaggcatacctgccatggtgacagaaattaacaaaatggtaggttgtctgaggaaagggtgaactttacggaatgctgagatgttcacgattttttttttttttttttttttttttttttttgagatggagtctcgttctgccacccaggccagagtgcagtggtgcaatctcggctcactgtaagctctgccttccaggttcatgccattctcctgcctcagccccccgagtagctgggactacaggcgcctgccaccatgcccggctaattttttttttttttttgtatttttagtagagtcggggtttcatcgtgttagccaggatggtctctatctcctgacctcgtgatccgcccacctcggcctcctaaagtgctgggattacagatgtgagccaccgcgcctggacttttttttttttaaagagctgtaggccagccatggtagctcacgcctgtaatcccagcactttcggaggccgaggcaggcagattacttgagttcaggagttcgagaccagcctggccaacatagtgaaaccctgtctccacaaaaaaatacaaaattaacaaggtgttctggtgtgtgccggtagtcccagcttttgggaggctgaagtgggaggatggctacagctggggaggctgagattgtgccactgcactccagcctgggcgacaaagtgaggccctgcctaacacacacgcacgcgtgcgcgcacacacaggcacacacacacacgggatctcactttgtcgcccaggctgctcatgaactcctaggctcaagcaatcttctcgctaggcctcccaaaacgctgggattacaggtgtgaaccactcggccatgtggagattttttttttttttttttttttcttgagacagagtcttgctctgtcgcccaagctggagtgcagtggcgcgatctcggctcactgcaagctctgcctcccgggttaacaccattcttctgcctcagcctcccaagtagctgggactacaggcgcctgccacc[131 bp omitted]caccgcacccggcccatgtgattttgagaggggtgtgagtgatacaggttcatgcatttgcctaaattaaccaaactacgcttaagatttgtgcattcgctgtaagtaaaccatacctctcactagacctaaacatattacggatggagattatctatgaaggcagaaacatgagtccacctcagccctagggctggcaagggaagcttgcggagcctttttgtcctttgtcagtgcttttttttttttttttttttttttttttttttttgctggctattgagccaacacctgcccctggcagtgcgttttgagcgtttttgagttttccccgggtttctggaaccaatcccagccctgtctatgcggtgatggcgtctagagggcgctcgtcaccaagctgattgctggatttccattcatttccagagaagtgtgcagttcacataatagaaccatccttggccaggagggtgggatgtcatttcttccctcccacggtcccctttcctcttctctgactccaggacactcaggctggctggctttctttctttggctggcttgctttctttcttgttcctttctttctttcttttttccttccttccttccttccttccttcttttttctgcaaagtctcgctctatcttccagggctggactgcaatggtgcggtcacagctcactgcagcctccacctcctgggctcaagtgatcctcccgcctcagcctcctgagtagctgggaccacaggcgcgcaccaccatgactaatttttttttttttaaagagtctctcgcggccaggcgtggtggctcacacctgtaatcctagcactttgagaggctgaagcagg[132 bp omitted]ctgaggcaggagaatatcaagaactcaggaggcggagcttgcagtgagctgagatcatgccactgcactccagcctgggcaacagagcaagactctgtctcaaaaaaaaaaaaaagtctctcgctctgttgcccaggctgaagtgcagtggtgtggtcttagcaaactgcaacctccgcctcccaggttcaagcgattctcctgcttc[134 bp omitted]gcctcccaaagttctgggattacaggcgtgagccactgcgccagccaacactgggactcactcaggaatattatgcacaccagaaaggcctgatgtggaagaaaatatttaaagggttcacaaaaaaatttagagggagcaactgaaggagattagaatatgccatgtcaaaatatgccaccttaggagccgggcgcagtggctcacgcctgcaatcccagcattttgggagactgaagcaggtggatcacctgaggtcaggagtttgaaaccagcttggccaacatggtgaaaccccatctctactaaaaatacaaaattaaggccaggcacagttgctcatgcctgtaatcccagcactttgggaggcca[132 bp omitted]tgaggcaggagaatggcgtgaacccgggaggtggagcttgtcgtgagccgagatcgcgccactgcactccagcctcggtgacagagtgagactctgtcccaaaaaaaaaaaaaaaaaaaaattagctgggcgtggtggcacacacctgtaattccagttactcgagaggctgagccaggagaatcgcttgaacctgggaggcagaggctgcagtgagccaagatcacaccactgcaccccatcctgggcgaaagagggagattctgtcttatgagataagagaagataagataagatgatgggataagccaagcctcaggaggaaataaagaagagacctttggattgaattgtgaccaggacagaagggggcatgtcaacccctctgtctcactgggctctccttgcccttcaagtgctggccccaagtccccttctctgcaagccctgcccaccagcccctctctctggctgcagagaaaagccagtggtggcagacgcctggggacagccatgtcctggccacctggcccagccccaggctggggcaaccagtgaggctcttccttgtggatttcaggcactctcattggcaatgaagtgctgtgtgcttagttccttacggctgtgtcacctgaacagttctgcccagtgagttatgaacagaagaggtgtgactcttctagcctgtagcatttaatggccagggcaagaccctccagagacctctcctgtgtgctccattggagatggtggctgtgagccaggagtgaggagatgtgggcagagccacagccacccagcaaaagagctggaaagcaacctgtgcgtgctttatacttcattttttgttgtagtggtaaataaaatacacataatgtaaaatttgccttcttttgttttgagatggactctcaccctgtcacccaggctggagtgcagtggcgcgatcttggcttactgcaacctccgcctcccgggttcaggtgattctcctgcctcagcctcccgagtggctgggattacaggtgtgcaccaccacacccagctaatttttgtatttttagtagagacagggttatgtcatgttgcccaggctggtcttgaactcctgggctcaagtgattcttcccctgtcttggtctcccaaagtgctgggattacaggtgtgagccgccacacctggccggcttgcttgctttctcttttttctttctttctttctctctttctttctttccttccttccttctttctttgtcttttctttctttccttcttgtcttttttctttcattccttccttccttcctccctccatccctccctcctttctctctctgtccttccttcctccctctctttctttctttttcctttttttttttccctgagacagggtcttgctctgtcactcaggctggagagcactggtacaaacatggctcacccactgcagccttgacttcctgggctcaagcaatcctcttgactcaacctcccaagtagctgggaccacaggtgcacaccaccacgcacggctaattttttttattttttgtagagatggagtttcaccatgttgcccaggctggcctcaaactcctgggctcaagtgatcctcccaccttggcctcccaaagtgttgggattaccggcgtgagcctcggtgcccggcctcacatgttaagtcctttcaggagagtgaggtgtgtgcagataaaccagatcccaggcgggcgtctcccacttgaagtctaaatgatgctgcctgaacacacccggtggtagcttgcttccaagaaggcagctgttggtttcttccctcccatgaggaggctgagttcattcttccagctccttgaatctgagctggctttgaccaagagaagatgatggaagtgactgtgccagtccctggcctcaaagttcctgcttcctttctccggggtcacttgtgcttatggaagccacatgccatgcaagagatgtgactgctgagcacggtggctcatgcctgtaatcccagcatgttgggaggctgaggtgggtggatcacctgaggtcaggagatcgagaccatcctgactaacatggtgaaaccccatctctactaaaaatacaaaattagccgggagtggtggcaagcacctgtagtcccagctactcgggaggcttaggcaggagaatggcgtgaacctgggaggcggagcttgcagtgagccgagatcgcgccactgcactccagcctgggtgacagagcgagactctctcaaaaaacaaaaacaaaaattagccaggcgtggtggtgggcacctgtaatcccagctgcttgggaggctgaggcaggagaattgcttgaacccgggaatcagaggttgcagtgagctgagattgtgccattgcactgcaggctgggtgacaagagcaagactccgtctcaaaaaaaaagagagatgtgaccacctcactgtgtgtgaaaagccatgaagggtggaacatgccagccatgaaaacagagagaagccagagagcacagaggggttggacgtgtgtgaagaagcccccttgttgggaggccgagatgggtggatcacttgaggtcaggagttggagaccagcctggtgaccatggcaaaacctcatctctactaaaaatacaaaaaaaaaaaaaaggccaggcctggtggctcacacctgtaatcccaacactttgggaggccgagacaggcagatcacaaggtcaggatatcgagaccatcctggctaacacggtgaaacctgtctctactaaaaatacaaaaaaattagctgggtgtggtggcaggtgcctgtaatcccagctacttgggaggctgaagcaggagaatggcatgaacccgggaagcagagcttgcagtgagccaagattgtgccactgcactccagcctgggcgacagagcaagactgtctgaaaaaaaaaaaaaaaaaaaaaaaaagccaggcatggtagcacgtgcctgtaatccaatcttcccatctacccaggaagctgaggcaggggaataatttgaacttgggaggcagaggttgc[132 bp omitted]cttcccagtggcctcagccaatgctgcgtggatcggagacaaactgcctaggcaggatgaaccacctagctgagcccttcccaaactcctgacccacaaaatcctgagcaaaataaaatggttgcttttgaaaccacccccgttcggctgacacaaattgcatgctaggttctggacagagacacaggtagaaataagcatgacacaggctgcgctctggcccacttctttggtgctaaaagacatggagcactggattctgagcacttgcatcctgttgttcctatagaaaggatttctgctgttaggactctaagactgtttaagaattgatttggggccagg[138 bp omitted]tggtggtgggtgcctgtagtcccagctactcaggaggctgagacaggagaattgcttgaacttgggaggcagaggttgcaatgagccaagatcacgccactgcactccagcctgggcaacagagcaagactgtctcaaaaaaaaaaattgatttggggtcaggcacagtggctcatgcctgtaatcccagtgctttgggaggttgagtcgggggatcgcttgagcccagggattccagaccaccctggggaacatagcaagcccctgtctctacaaataattttttttttttg[131 bp omitted]ccaagacgcctggctaattttttgtatttttagtagagatggg[148 bp omitted]tctctctctccttccttccttccactctctttctttctatctttcttcttccttttttttttttctgagacagggtcttgctctgtcactcaggctggagagcactggtacaaacaaggctcactcactgcagccttgacttcctgggctcaagcaatcctcttgcctcagcctcccaagtagctggcaccacaggggcacaccaccacgcacggctaatttttttttattttttgtagagatggggtttcaccatgttgcccaggctggcctcaaactcctgggctcaagtgatcctcccaccttggcctcccaaagtgctgggattacaggcgcgagccatcgcgcccggcctctacaaataatcttaaacattagctggaagtggtgtcatgcctctgtggcttcagctacttcagaagctaaggtgggaggattggttgagctggggaggttgaggctgcagtgagctaagagcaggccactgcactctactctgggggacagagccagaccttgtctcaaaaaaaaaaaaagaaaaaaaaattgattactggatctctgatgttagactcataaaacttttttttttttttttttttttgagacagtctcactctgtcactcaggctagagtgcagtggcttgatctcggctccctgcaacctctgcctcccgggttcaagtgactgtcctgcctcaacctccagagtagctggaattacaggcgtgcaccacaaggcccagctaattttttttgtttgtttttgtatttttagtagagacgggggtttcaccatgttggccagactggtcttgaactcttgacctcaagggatcctcccagtgcggcctcccaaagagctgggattacaggcgtgagccactgcacctggtgcctatattttcattctggaaactaaaacggttcctgatacacagtataccaaatatatgtcacttcctttatgataggagggcaggaggaagggagagaggaaaagataaagagagtgaaggaggttgggcgcggtggctcacacctgtaatcccagcactttgggaagcca[136 bp omitted]gaggcaggagaatcgctggaacctgggaggcagagtttgcagtgagccaagacggcgccactgcactccagcctgggcaacagagcatgactccatctaagaaaaaaaaaaaaaaagaagacaggaggagcccctatcctggtacagtgagcccccccacacaccccattttacagatggccatggtgaggcccaggtggagagaagcccgggctcacatggaaggtccggagtccggagtccggagtccaggttaggaggcacggccagagatcgccgcccactcagcctcctggattgcacggttcagtttgatgcacttttatttccaagaacaaaggataaagggactgttattaaattataccaccagtgccctgctcaagcacacacaccagacacacacacacaccagacacacacacacaccagacacacacacagggccacaagtgaaactggccaggtctggctgggtgtggtggctcacacctctcatcccagcaccttgggaggccgaagcaggtggatcacctgaagtcaggagttcgagatcagcctggccaacatggagaaacccgcatctctactaaaaatacaaaaattagccaggcgtggtggtgggcacctgtaatcccagctacctgggagactgaggcaggaaaatcgcttgaatccgggaggtggaggttgcagtgagctgagatcacgccactgcactacagcctgggtgacagagcgagacgccagagtgagagcgagagccagagagagagagagagagagaaagaaagaaagaaacgggccaggtctgaataaagtggatgaattgtatcaatgccaacagcgtggttatgacattgtaatagactgttgcaaaatgttaccactgggggaaactaggcaaagtgctatttcttataactgcatgtgtttccaatcattacagcaaaaaattcaattacaaaatatatatattttttgaaacatgatccaaagtgcaggggcgtgatcacagctcactgcagcctcaaactcctgggctcaatcctcctccctcagcctcctatgtagctgggaccacaggcaggcaccaccacacctggctaattttttatatttttagtagagatggggttt[144 bp omitted]caaaaggtgctcacaaaagggaaaccgaggcagggcatggtggttcacacctgtaatcccagcactttgggaggccaaggcaggaggatcacttgagcccaggggctccagaccagcctgggcaacataatgagaccccacctctaaaaaaaaaaattacaaaaattagctgggcctggtggcgcacacctgaggtcacagctactcaggagactgaggtgggaggatgatttgagcatgggaggtcaaggctgcagtgagccatgacagcaccactgcactccagcctgggtgacagaatgagacctcatctcaaaaaaagggaaactgaggcaggggagcgctggagctgttgccctcacacttcacgcggggaaactgagtctccctgggggtggcgggatgaatgtaccccagggcatcttcccgaggctgcccacagaccccaagccctgcatggcagggagtgaaatgttagcttgatagaaggaatgaagacagccagaaatggaatgaacagggcaggcaccaccggggagtcagtgaggttccaacccaggggtgccagttctatccggccacccaaaccccaggtgggaacactcgtatcagcgggacccccagctcacccaggcttccccgacacagggagctggccctcccaccctcccttcctctctccccaacgcttaccccatcccagctttgaccaaggaggtaggtccttcctcacgtctgacttgattccatcacacttcactttaaacaggtttctcattcttcagggtgagtcagagaccaggacaggccacagggttgcctttggcaaggggacaattaaaggccagaatgaaaggggctgatccagcaggagggatccctgtggttagtgacaatggcaggaagtaaaatttgtgtgagtccttttatgctgcagagggaggagagacatcctgctggccttctcccagtcct[133 bp omitted]ctgcctcagcctcctgagtagctgggactacaggttcccgccacca[184 bp omitted]ggtctcactgtgttgcccaggctggtgtcaaactcctggcctcaagcgatccactggtctcagcctctcagtgttggaattacaggcatgagccaccgtgcccggccattattactattattaattgagacagggtcttagtttgttactaagtttgttacttagtttgttactaagtttgttacttagtttgttacaggctggagggcggtgatatgatcatagctcactgcagcctcaaattcctgggctcaagggatcctcctgcctcagcctcccgagtagctggaactacaggtatgtgccaccacacctggctaatttttgtattttttgtagagatacgggtctcactata[135 bp omitted]gtggctcacacctgcaatcccagaactttgggaggctgaggcgggtggataacctgaggtcaggagtttgagatcagcctggccaccatggtgaaatcctgtctctattaaaaatacaaaaattagccaggcatggtggcgggcacctgtaatcccagctacttgggaggctgaggcaggagaatcgcttgaacctgggaggcggaggttgcagtgcgccaagattgcactactgaactccagcctggtgacagagcgagactctgtcaccaaaaaaaaaaaaaaaaaaaagaccaagtgcggtggctcacgcctgtaatcccaacactttgggaggccaaagtgggtagagcacttgaggtcaggagttcaagaccagcctgggcaccatggcaaaaccctgtttccactaaaaatacaaaaattagctgagtgtggtggcgcatgcctataatctcagctacccagggggctgaggcatgagaatcgcttgaacccaggaggcagaggttgcagtgagccgagatctcgccactgaactccagcccgggcgacagagcgagactccgtctcaaaaaataaaaaaataaaaacgatggcactgtgaacgggtctgttgactatttcttggtctcttggtttatctcctcccagctcaggcttgctcctcgccacagtggggctcaaggcagttgcacctcggcacaattttctttttttttttggagacggagtcttgctgtctcccaggctggagtgcagtggtgcgatctcggctcactgcaagctcctcctcccgggtttatgccattctcctgcctcagcctcccgagtagctgggactacaggtgcccaccaccatgcccagctaattttttgtatttttagta[133 bp omitted]cgtggttttagctttttctggaaaatcgacttaatccgcctaccacagccactctgcttcctgtaaggccactttccctgggttcagagagagtcctcgctcctctagcgctgcctcactttgt[140 bp omitted]cccatctctactaaaaatacaaacaattagccgggtgtggtggcgggcacctgtcgtcccagctactggggaggctgaggcaggagaatggcgtgaacccggcaggcggaggttgcagtgagccaagattgcaccactgcactccagcctgggtgacaaagcgagactccatctcaaaaaaaaaaaataaaaaaggctcttggggccgggcgcagtggctcacgcctgtaatctcagcactttgggaggccgaggcaggcggatcacctgaggtcgggagttcgagaccagcctggccaacatggagaaaccccgtctctgctaaacacacacacgcgcgtgcacacacacacacacacacacacacacagaaaaagttagctgggcgtgatggcctgtgcctgtaatcccagtcactcagaaagctgagcaggtgaatcgcttgaatccgggaggtggaggtcgtagtgagctgagatcgtgccactgcactccagcctgggcaacagagggagacgtcgtctcaaaaagcacctgtgttttcggaacattcaccatgtttgcaggagcactattggcacggaaaaaaaaatgttttgttttgttttgttttttctttttgtttttgccagagtcttgctcttgttgtctaggctggagtgcagtggtacaatctcagctcactgcaacctccgcctcccaggttcaagcgattctcctgcctcagcctcctgagtaactgggattataggcgcccgacaccacgcccggctaattttttgactcttagtagagacaggg[136 bp omitted]gggtttcaaagaaattgtgaaggtcacagggtttccgcacagtccacaccccacacctggtttctctgacaatctgtgtggtgcagtagcatgtgctgctgtctttttaaaggatccccgaatcactgctgcaatgtagaggtgattttgccatgaaggattcagtttgctcccacccctgacccggtgggacacgtgggcagaccccggcccgggcacctgtgcgccagagctggtggttcccttcacagaggggcagactgggctctggaggctgggggtggcctcggtcaccgcctgtgaaaggctcccagttcctccagctccagaattttcctgccactctacaagaagagactggaagagggcgggactggcagagaggaaaccacaaaaacaggattgagagcagcagctcagaagacaagctgttcctggcaggcggccgggggcaggcagcggtcagcgggggggcctggcagggctgggcggggctcggtgccacccgggagggaagtgacttggcctatggcacctcccacacttcctacacacaagccaggctgggcaagggacaagggcaacaggccagggagccctgaggatggccgggtgggggccgtctgtgtgccttcattcattcattcattcaatctgttatgtgcgagttcacaaactaggacaaaggaggagacagctgagctcagcccaccttcaagggtggcagatgagtaacccagggcgaggaacattcacggatggtcatgcggctgcaacacggcccgagctcctagggagcacctccagaagtgatcccagatccgggggctgaagggtgcagaggagaaaccaggtgcagaggatgttggggaggccccgctggaagggggagcaggtgcataggcccggcatccagaaggagctggggctggagaaactgagaggagggcagagtttgagggggaggcttgcaggctgggtactctgagccttgaactcctgggctcatgcaatcctcccacctcagccttccaaagtattgagattacaggtgtgggccactgtacccagactaaataaaataataataattattattattatcattattattattattattattattagaacctaaactaggtgccagggcagccaagagcactttgtttttgtgctgtgggcaatggggagccatgggaggtgttagagtaggggtgggctgtgattggttttaagtcactaggagaaaagaggcagaggcaggaatgggggctagaaggtcagcaaggagtctggggccttggcctggggtagcagtaagggggaggacaaaagtgggggtgattttgagaggagacttgggagttgagattcaaagggtgtgatggggggaaaggaggagaagacagggaagaccaaagccagagagaagagagaccctagggatggggctgaggagagagagccgtccccagctcggatgaggctcagacaggttggccgcagcacccagagaaaacctgggagctgggaccctctgggtttctgggggctgccactgtccagggtagaggcctggccaggccccaccctgtggtcatctggcccagccctctgttttccagatggggaaactgaggcccaggttggcagtcatcttgccagccccatagccccttttccaggggacagctcggaacctcgatttccagtctgtgccttgaggctgtgggggaagctaacggaggaccctgagcccctccctcccactgcagctgcagaacagggctagaaggacttcatgggtcatggggttcagtcgggactgtggggtagccacgaagtgccctgcagggggtgacagacccccggtgcccggcccacccttcacctcccccagcagttagccctgcagggctgggcccgtcctggccatggccgtggtctctgctccacctgggtctccccggacccttcctcctctaggcccagctggaatccaccacccccggggccattcacatgaaaagtccagaacaggcaaatccccagagacagagagtgcactagtgaccaccgggggctggggaggtggggaaaggcagtgactgccggtggggcgggcttgctgttccgggtgatgagaatgttgcagaattggattagaggcgaaggctgcacaactttgcgtgtgctaaaaccattgaattttagacgcagtgggtgaacagcggtgctgaggtttttttgttttgttttgttttgttttttagaaagagtctcgctgtgttgcccaggctggagtacggtggtgcaatctcggctcactgcaacctcagcctcctgggctcaagcgatcctcctgcctcagcctccctagcagctgggattacaggcaactgccaccacgcccggctaattttgtatttttagtggagatggggtttcaccatgttggccaggctggtctcaaactcctgacctcaggtgatcctcccgcctcggcctcgcaaagggctgggattacgtgagtgagccaccgcacccggccaggtgctgagttttatcacagtaaagctgttatctgaaaaaataaaatgctgcctgggttccctgttgcctttggggtgccgccccctccccggccgtggtcgggtgtgtccccacacggtgcttactctcgcgctccagcctgtcggtgtgcaggtaccataagcttccttcacctcctcacgccttctcccatgcaggctcctggggcagggcagggaacccttccgtcccgagcgccatctctcttgcctccagccccctccaggcccaaaccccgcccctccagaccgcaagccccgcctttccaggcccaaacctggccccagacacaagcctcacccccacctccagttcataagccccgctccctccaggcaaaagctccgccccccaggccataagtctctgccttccaggcctcaaacctcacccaatacacaagccccgccccgtctgggaacctcccccaagcctcgcccctccaggccccaaacttcgccccagacgaggccctaacccttcagattccaagctccgcccaccaagtccaaggctccgccccatataataagccccacccccagacgccaagcctcgccccctccaggcctcaagtcccgccccctcaggcgacgtcatcggtttctttcttgctgggttttgtccctgcactgcgctaccagcctgtagctcacctggctgcccttggctcccgcttgatgaatccggaaactgaggcacacagtagcctggatacagctgggatttcagcccaggctggcctccttaaccactaggcttcgctgtcctccttccgctcccgcctccaggaagcccttcctggtctacacccaactccaggatctgaggtcagcccttggccgtccagctcatcttctctgccaccagccccagcacagcgtcctgcctgcaacaaaaacttaataatggctgaggggggtgaaccctaaagcaggcaggggccggccatgtgcagaaggttacaattactaggacttgttaggttgcacagtcccaaggcagcggcaacaacgtctctcaccctctcccaggaggagacccttccccttcccttgaacctgggcgggcctcgcgtcttctgtgaaaccagagaaggtggcgggggtggcgctgcctggcttctcagcaggtcagcctggcagcttctgctttgtttgcttggaaccctgcttactggagcccgagcttgggaacacagctgccatgttgtgaggaagcccaagccacacggggaggctccctgcaggcgctggccctggtgaagagctcgcagctgagccctgactgggtgtggtggctcacgcctgtaatcccagcacgctgggaggccaaggcagctggattacttgaggccaggagttcgagaacagcctggccaacataacaaaaccctgtctctactaaaaatacaaaaaattgacttggtgcggtggctcacgcctgtaatctcagcactttgaggggccgaggtgggcagattacctgaggccgggagttcaagaccagcctgaccaacgtggagaaaccccgagtctactaaaaatacaaaattagctggacgtggtggcacatgtctgtgatcccagctactcgggaggctgaggcgggagaatcgcttgaacctgggaggcggaggttgcggtgagctgagatcacgccattgcactccagcctgggcaacaagatcgaaactgtctcaaaaaggaaaaaaaaaaaatacaaaaaattagctgggccgtggtgacgcacgcctataatcccaaactactcgggaggctgaggcaggagtatccctgaactcaggaggcagaggttgcagtgagccgagacatggcaccactgctctccatccagcctgggctgtgaatgagattctgtctcaaaaaaaaaaaaaaggacagggtctcactctatcacccagcctagagtcagtggcatgctcacggctcactgcagcctctacctccttgggctcaagttgtccaaccgcttcggcctcccatgcagctgggactatgggtgtgcaccaccacgcctgggttttttttttttttttgagatggagtcttgctctgtcacccaggctggagtgcagtggcatcgtctcggctcactgcaacctccacctcccaggttcaagcaattctcctgcctcagcctcccaagtacctgggactataggcacccgccacctcgcccggctaatttttgtagttttttagtagagacagggtttcc[144 bp omitted]tggagtgcagtggcatcatctcggctcactgcagcctccgccttctgggttcaagcaattcttgtgtctcagcctccagagtagctgggattacaggcatgttgcaccacaccgggctaatttttgtatttttggtagaggcgggatttcatcatgttggccagacctcgagtgatccacctgccttggcctcccaaagtgctgggtaattacaggcgtgagccactgctcccagccgagctcagctttttgcctgtcttcccagcagtgcatccaggcatcctggagcagagacagaccccacaggagcgcaccccctcaaaactcctgactcagcatcaccagcaacaacgtggttttgcaccaactggttgtggatggctccttatgcggtgacagaaaactaaaactcaggcacacagcaagttttttgacttttattaaatctttacaaaacagaatacaaaattccggcattgacagttggtgtaaaggaaaacttctgagctccgtcagttcacctggtacattggaattaaagtgcttggatgtttttcccccactttaaaaaaacttttgaggttttttttttttttttgtcttttaaaaacatcgtaacattaacacatggccgttcaccgtcccccagcgatgggagctggcctggggcccagggtcctccaggatcttcactcattcacagtaacggttctgaccagtcctccaggtcgcacgtggatgcgacaggggtggggagggaggaggaagtgactgtcccaccttcagaaaaaaaaaaaaaaacaaacaaacaaacgctgctagccactcagctttagagacccgatggctatgggcgcctgcagcgggcgggggtccatttgcttgttctttgatacaaaaaggcagagaatcccccgttacgaaacatggaatcactgacaggcgagaagtgatgggggaaaggggtgggcggaatgccccaccccccccaggggtctttggaaggggcagtccacagatatgggcagtggggaccagggaaggcagagcacccccacggccaccggactgtgaccatcatacgagattcaggaggggcagcagggccaggcagacggtctccgaggcccccacccccaggccccccgacattcaagtattcttcaagaacagggaagcaaagtccatcgatgtgttgtttttttttaaggaaaaactaaaaaactaaacaggaggaagaatcccgaccgcggatttagaagccagaggggctgccccagctgtggagctcgggggctgcgccgggaagggcgggcggtgaccctagccgcgcgcacttctaaagtggaaccctgtattgcatagaacgtccccacccgcggggagggggcagcaggctccgcagcccccgggggttggagcatggagggtggggggactgagcagacccccgcattcctgggtgcccgaagggaggccgaggccgcagccgttttcctgaaggtggcagaccaaaaacactgccctgggggtgaggattcggccagaccccggggtctgggctcagctctaaggacaaggacggagctgacggagcttccaggtcaggcccgaggggcggcgcgaggcaggacgtggctacggtcagactgagccctgagaaggggcactcgggtgccccaagggggtgtcttcaggaccccccacattggctgacagtgcctgtccagcccctctgcctgctgcggtggaaacggcttcgggccaggcggggctcctgctgtctcaggccttggtgtggaggggaggggcagcggcgagcccctggggtcagctgcagtttaaggtcaaggtcggaggccgaatctggccaccaggagtcctggacagacagacgggccttgcaggaagccccgattgtcaactatcatggggacaaggcaggcgcgggtgaagggctgggggatcccatggggtgggtgggtgagctgcctgccacctgcctgcctgacacctccagagacaggcagcccctcccttccccaaccaagccaccaggggtgctctcagggtgagggatagaggggaagagcctgtccctgaaatactgcgggctgggagggaacacgagggcagggtcctgtgcccctccccagctctgcaagatggcaaacgctgtgggcctgctctcctgagtcactgcaagccacgtgggcagatggcgggcagcacaggtgacctgggggcaccttcatagtagaggtgagcagggcgggggaccggggaggggacaagcccacccacctaccctctgctcaccttcccgggtgcctgcaatgcttttaaccatccaaaggaaaaaataacggggaggggtggaaacaggaaaaaaaaaacccaaaagcaaaaaccttctataaaacacccccctcagctgagcttagtgcctgggaatccaggcagaggaggggcagcccgctggacaccggctggcgatagcttaaaaaacctttagatttgattgggggacgggtgacctatgtacagaggggagatgggagggtcaggcgtggtctcccaccaggaccactggggccgaggacagactggccctttgccgccgctgcgccagcttggactgggagggtggagacagctgcaggcagcgtgaggtagctcggaccaggacgggctggccctgccccgcggcctcctcctcagccaggtcctcgtcgtgctgggccagctgccggttcatggcaatggcctcagccgcgaaggacgtgaggtctttggcacagctgttcctgggaaacggggtgggggtaggtggtcaccaagaggcacccctcaggggacccctggggtctgtgaaggccctgggggaaggggcttcatgcccccctcccagcccccaccctggggctcctctgagcaccagggccccaccgggagcttcactgagtcaccaggcttgcctgcctccccgaccccaaagcagttctccgggtctttcacaaatgtcttaacctggaaaccccgccccctggactcaggggtcccgagcacccctgcgggccttacctctgcaggaccatgggagtgggcaaggtgttctccggggcgcactgcaacgagagtgggcgggggcagggctggagagcagctggggccgcctggggcgctgggtggggtgtctggccaagggatgccatgcccatcccatcaccaggaccccaccggagaccaggagtgcacctgggtgccccgggagccaagcgcccaccccgaggtccctatggtgaggctccatgtccccctgcccagggaacccgaggctgggccaggctgaggcctggtgttacaggacccagtgagggtgggggcagagccccaagccccatctctcccggctgttcccagcccaaacccacctccgcccccctcttaacccatgggtctctggatgcttctgcaaggagattggaggcccccagcccctcgcctggggacacagagtgaccccagcttctatttttagtaaatcctcactccctggggtggcagctcagctcagatgacctctggcaggagaaacacccgactcctcctcgactggaggccacacagggaagggtggaggcacagcctgggcttgagactgacggcaggctaggctggggtctatgtgagctgggctcgctgcccgcttcgctccagcctgctgcaggctgtgggtccccaccaccctccaggaaggttctctgagtagctgctcctgggagccgcctggctggccagcgggcaccgtgcacaggcgggcggtggggatttcggctgcacccctcatcccagggcagagcctgtgctctcaagcctcagtgcatctcagggtgtccaggctacaccctcagggcttcccatgctcgctctgaggccaccctgcagcgcccccatacccctcctgccgcccgtgcggctggtactcaccccctgaacccaggggtgctgcaggacttgggcggcactcagcctctgcttggcgtcacggaccagcagcttggagatgaggtctttggcagcgcaggagatgtgggcccagtccttgtcggggaactcgtacttgccctcctggatgctctcaaacagcatgttctggggacatagaacacaggggagcttagacctgcccaagggcctggatactgtgcactgacacgtggctccaaccggaccccaaccaggccctagaccaggccctagaccacgcacgcctggggcagagggggctgggagccggaccaggagagtcagctccacccaagtggagctggatttacaaaaaagcagctctgagggacctggttccagggaccacaggccacagatgctgagccttaagccgcgggcagggagcctgagcctgatccccccaaaccaggggcctcactccacctctcagctctctgaaccctgtctggggtttcccttgggcaggcaaacctgaaaagccttcgggaaactggcagacagggcggcactgccctgtggatggcatcagggagtagggcacaccgggcaggtccccaggggttagggggagtacagagtaggtccccgggggtctggggagcacacagggcaggtccccgagggttagggggtggtcagggggcaggtcccctggacttagagggtgcgcagggcaggtcccctggggttagggggtgttcagggcaggcccgggggaggagggtgcccaggagaggagggtgcgcgggccgccgcacctggcaggcagggcaggcctcgccgcggtcccagccgcagtcgctgccacagcggcccacgaagggcgggtagccgctgagtaggatatacaagatgacgcccaggctccacaggtcgcagcgcttgtcgtagatgctagcctcctcgctgaaggcctccactacctccggggccatgtactccgccgagccgcactgcgggcgggggaggggcgcgtcagccggggtttcccagcattacgtgggaaccgagcccgggtaactgcgggtcacctgcgccagccggctcggaccccgccccgccgggcccgaccaatcagcggctgccgggaacgcgcccccgcccaatcagcaggtgcagagctcgcccctcccccgccgcggccccgccccacccggccaaacaccgacgcgttggggcgcctgctcgaggccccgccgcgacaccccgcccaaccaatcagcggctgttgctaggcggaagcccgagctccgcggcctggagctgctggatggcccaggctccgcgaggttatgcaaccgcagagcaggcggccgagcccccagccctccccgcgggccctcaccggagtgagcagctccggggtggagataggggagcagtccccgttgagtttgatgccgctgcccaggtcgaagtcacagatcttcacgggggagacctgggaggggccaaaaggtccgtgagcctggggtcccacgcggtccacccctcccgcggggccaccctgccggaactggcctacctggttggggtgctcacagaggatgttttccggctttaggtccctgtgggcgatgcctgggggagaagccacagaaccacgacggggtgagggtctggaggtcttccaggagtccttggcaggcggccctaggagactccgggcggggtcaccacctacctttgttatgcagaaagtccaaggcgctggccacgtcctgcaccaccacgctggcctccagctcgttgaagtgccggcgcttgtggatgtggctcaggatggagcctgggcagggcagggcagggcaggacagggggaacacgcaggtcacctcaaagtcccctcaaggccagcacccacctccactttggcggggacgcccccacactggcttcctccagcacaaaggcctcacccctgagccaccatttgggcaggacactcaccccacaagccccctcctgcaggtggcactaggcccccatcccgtaatacctcccagctccctccctcctcacagcctggagcccccaggtacctccccgcatcttctcaaacaccaggtagaagcggtcctcctcctcgaagaactcaatcagctctaggacgttcctggggtgggggtgggggcaggagaggagctgaggcttcctgaggcccctgggtacctgctgcccggcctaggaggggcccaccctcttggtgctggcctgtccaccggaagctgggactggggcaataggccagcttcacactgcccgcctggggctgtcagccagcctgcttcagggaggggaatgcagggcctgggaaactgggtgccctacagacgcttgctgggggtgatgtggcactcaggcccttcatccactgaaagacagctcaggccagtgcggtggcaagggtggctcacctacctgtgtccctggcactggtacagcatctccacctccctgaaaaccctgctccgaatgtggcctggctgcttctcaatgatctgaaacaggcgaaaggacacagcacctgggttggtgggacgctcatagtcgagaaggggccagaaactccactgccacggctggaattcaccacacttaacgccctgcaactctagaaagcagggctcacgcctgtcatcccagcactttgggaggccaaggcgggtggatcatgaggtcaggagattgagaccatcctggccaacatggcaaaaccctgtctctactgaaaatataaaaattagctgggtgtggtggtacacgcctgtaatcccaactacttgtgaggctgaggcaggagaatcacttgaacccgggaggtggaggttgcagggagctgagatcgcgccattgcactccagcatcctggtgacagagtgagacttcgcctcaaaaaaaaaaaaaaaaaaaaaaaaaaaaagccagtggaggctgctctccacctgtgaccctgacagccctcagagacacatttgagacctatgacttctgcaaaatacccccacaggacgtgagggttccctgccctgggcggccaccctccctgacccagagacagtcagctgtagtcctctttccccacagggtgggtacctggtcacccatagaactagggaggcctcaggacacctggctgccagcccaccaggccccacctcacatgtggccacagcaccaagtcctgctccccagctccgtgccagcctgggcagacacttgcctgccgcctcagccaatatctgtttcgggcccaccctggttggctgtcccagccactggcggatccagcctccctgagccccagagcctcaggaagccactctactgcccccagcagctccagctgctccctgccaccttcactcacagaggtggggtgaggaggcgtctgcagcttcccctggcacctgctgggaccctcctgccaggctggacatgttagcccctctcactgggcgggtgcctggctgcatgagcactctgcccagggttccctgcccagtgcgatggcctggtggcagcagggatgtggcattccacccttgagtccctggctcctgcctctgcagtcccatgtctatactgacagacaacactgtcccagcgaggggcaagagaacaactggacgccagggtgtcctgaaataccaccacccaggccgctgctgaaagctgtgcccagcaggcactgcagatggttctggacaaaactgaacctcgtcctgtcccttgggtggctggctagaatgctgcttcagggagggggcgcagcccctcctggcatggaaggggcctattctgaggtcccagcatgggggctctgcatccagccagcagcctcacggcaccaggtgaccccagggtggcttcccgcagcatgaccccgagggcagagggcccacaccccagtccccatagaacgaaacaacgctcctcagacccacaggcccagcgattcgcctctctgactcgcccaggacacctcctcctcccactgccacctggccagaccaactcccggacgtcagtggccaacaacacctccagcaggaagtcccccaggctctgcagatcccaacactgaccacaccaggtcaatgtggcaagatgaccagggaggtggctctgagacaccagttaggatcccccagaggccacacagcatgagtcaggctacctaaccccctgagcctcagtgtccctatctgtcaaacaaagacaggaagcaaggctgggccaccaggagagggctgtgctcagaggaacgcctgctgtgtggaagtgcttccggaggggcctagtgctcctgcaccattgccttggcctgcctgggggctcccaggaggcagggaccgtccgtactgtgtctgtccctgcctgctgccactgtggtcccagcacctagccagtaacctccccaggttggccacccctcttcttcctccttctcctcagaggaaagctctagcctggccgtccaccaggacccacaggctcctggcgagccctgctcgccagggcacacctggccctctttcccaggcagccagccctcctgggaccccacccagcccgggagccggatgccaggtcacgagggaagcctggaagatttcttggaacacgggatccaaccggcccacaaggtcacagggtcacaaccagagcctcaacagggctcctgctcccagcccttcggccacaccctgggtccagcagccgcccagggctagagtgacacagggggctctcacgggcctgcactgaggttccccaaacgcagagcccctctgggccctgggatatgacattgcattttgatccttgaaaccaaactgtcatgtaccctcagggacagctcagaggcagggacggcccaggggacccaatgggcacagtgcctctgtctgaagcccccaccctggtaccagaggggccaccctcactgtcattcccgactggactcagggcccggtggccacttttagacacgggtcttcccggctgtaggacggacagccggaatgccacacactgtttccacccccgctcaacaccgatcccaaggcgctgggttccccagggcgcggcgcgggcccaccttgacggcgtactcctggctggtgatcaggttgatgcaggtctgcactcgggcatgagcgccctcccccagcacatcttcctgcagctggtagacgtctgccgggcagcggggcgggcgtgagagggaccctggcttttccccgctcccggctcccccaatgcccgccatccccgctcaccttcaaacctgcccgagaagctgtcggtggcccggccgcgcttcttcttcttgcccctcttcttggcgtccgggatgtcaatgggctggctggcgggcatgtctgttccaggaggcacgcccagggggctcaggacatggccctggccggccggcccccacccccctgcaggggctggccactgccatggcagcgacagcagctgccctgtgccctcctccccctcgggcccctcaccagggcgggctgagcactgcaggccaaagtcagagtctccgtggtcgggctggtctagggagaaggccagctcgaaggggttctgcccctgcaggggagaggagaggagaggcactcaggccccatccctgcccacgcagcagggagacctatcctgccccagtgtcgcagcgtccacactgacaagccctgcgctgagcattacggaaaaatcaactccgtccccgctcacacaccaggatcaactcccaccaggatcaactcccgaaggggcagacagcataaaccaggggacccccaagctcctgggattcacctcctcgctgccccacactcagtgtgtgtgtggatttctctcttttttaaatttatgttttgtagagataaagtcttgctacgttgcccaggctggtcttaaacccctggcctcaagcgatcctcctgccttggcctcccaaagtgctgggatcacaggtgtgggccacatgtggaaggcgtgaggcctcctagcacctcagcaaggcaagatcaggggacgcagagtctcttagggggtccatggaatttgccaacccagggggtgattctgtcccccaggagacactgggccatgtctggggacatctgtggttgtgaccggttgggggagctcctggcacggagtggggtggggcaggggtgctgctcagcaccctgcagtgcccaggacagccccaccccagagaaagatgggccccaacctccacagggccgtggggaagacctcctcccacctgcagagccctgggggcctctgggaaaggggtgcattgcggggaggggacagacacaagcagctggctcttgggaaccctgcctctgatgccaggattgagtcaccgtggggcccaagccgtgtcttgcacctccgtctgcttgtccacagaatggggacggctgacctctggggcgggtcgcggggatcaaaggcagcggggcagtgggaaggaggtgagtcactaggcgggctgccagcctggtggctgtgcctgctttcccacggcctcctgggccatctcagggcagctgagtcctccctgggcctcagtttcccccatctaagatggcacacaaccacctctccttcccctaagctgctcccctccctttcgctcagtgcctggggctggcggggtaagaattcagtgcctggtgctctggggcctgctgaaggtgggggctctgcttccatcacccctgccttctgcccctacccaagcccagacacctgcattcctccgcccatgtcccgcagctgcccggcacacctttcccctgccagctctgtgcacctacgcccccgccacccaccagaggctcatctgcttccagccccccaaccccgcagctaccagttaccgagtcagtatacacagtgctgtactggtcctgggggctcacgggagaggcacccacaggcgcgagtgtgccaggccctgcccagaccacatcctgcactctcccatttcagtgccagacacccctggagggagcccctggtgggccctgatacccggctaaggaagccgccttgggccctgggggccaggattcaaatccaggcctgttgcactgggcaggctggggctgggtcatttcttgacccagccccaggaccatgggagcaagaccctgaccagggtgcaaggaacagtgcagattagagtaggctttgcccagcccccgtggaagatggtggcatacatatgtacgtttccacagagcaaatggcccagcgcagggactgccggccctttacgaggggccgggcctttgaagctggggaaccgaggcccggtcaggttccttgtaccactgagctctcactcagcttcacccgtctgggtgaacccaggcgggaggggcccacagaggtggcgggggtcccagtcccagtgaggatgctggctgctctgggccaagtcactgcccctctctgggccccagacaacctgagtggggctctaacaagagggtcgttcagcagaagtgagactccagtggagcccgtgggagacccaaggccaggagatgggtggaggccagagggcagagtctgggaggggccgtgagccaagctgccctcctgcctccccacccaccctggctcgggcagatagctaccaggaggctgctgggggaggagggaaggaaggggggggctccaactagcccccatgggagtcagcattcccataaggctcctgtccagaggcccctggtggccctggggcagccaccacaaggcaggtgaccagggtctaaggccagactggagttcacctgctgtctgaccttggcctagtgacctcaccctggggtctgtcagcggtgagacgggaggcagctgcccccaactcgtgggagctcacgagagtgaaatgacctaaggggccacagagcccagcgtgagctcctggccctgtctggccaccgttcccctgtgccagccacagcctccaactcagcaaagctacagatggacggccgcagccaccacagcggaggggccaggcaccacgagactccgcggcctcctcgcccgtgtacaggggagccccaggcacacgcgcctgcagtctcagagcctcactttcccatctgcgaacggaaagaaacccaaggcacccacagacgtgcctccctgctgggctgctgcctgctggaggcaaggagagtatttcaggagaggtggccccaatccagggagcagccgtgcatggtgggggctgtggggggagattcctagagcaaccggtcccggccacctggaggaacacctcacagccaggactgcctgccaggccctcctccaccaagacgcccaccttcccagctcccagccaggctgccctggccatgcacagaggccggcccacaatcctgggcagtgtgggcggtcctggtcccactgttctaggtctggctgtgggactcgagtcagcaggccttggcaggaggtggctggaaccatctagaaagttcaagtgtgctttagctgcctggctggccccatgcactgactctgtatcagctcatgcctggccctaggagggagaagaccactgtcaggtcctcctctttcccgcccagcccctgacactctgatggtgccaggcctgctgccctaggggaaaactgggcaggggtggcaggggtggagtgctgccctggggcactggctggacagacctgggaattcttcccagtctctctttgctcctcccaccctggagcaccgcgttgtgtgtacacacaagacagagacacacacacacacaaacacacacacatacactcacactctctcttcctctctccagtcctgccttccctaccgggcaacaggtccctgcccaaggaagcccagtgaagcgattacataaccccggcctgaggggtggggcgggccggctgacatcactgcgtcccctgggccaggtcctgcggggcccctgcccagcacctgccctccccttcccccccaagatttgctcatctgaaaccagcactcaacagcagtcaccacccgggctgcgcagaaacttcccgctccgacaggaaacagcacttgggcctggggtgtctgcgaagtgcagggctgaggggacatcccatcccctcccccacggcacaggccccctgggggtgggtgcacctgaccagcccggcctggggattctgaaagaaagtccccagaagccacatggaggtgggaatgggactgtggcccgctgacccgtccccaccagggcacaaccagctggagcttgcaggggacaccccccataagccacatgcagcgactgggacaggactgcagcctgctgaccccccagaacatacccggcgggggcttgcaggggacacacagcctggtgccctgacccggagggggctcctgctcccagcctcacttgggggtcctggaggaaggacccggcggccatggctggagagaggactgtggcctgctgaacccccatcctcgcacaccgaccccgcttcagcgcacggccggcccgggcagccccgggtgtagggcgggggccaggcacgagccccgggagccgatcttaggggcgggccccgcgccccccacgccggccattccggtggtccagcccggagcgcccccaaaccgaccccgggcctcaccttgaacgaacggtggaaaccctgaagttcggctggtttcttctgcaccatcttctgtccgggccccgccagcgggggaggggaccgagggcccggggggaggcccgagggcgggcggccgggcggggggcggccgaggaggggaccctgcgggcgggagcagacaaagggagggcggtgagcggagcccggcctgccaggagcgcggaccgggcgggggcggcgagggctccgcggggcccgtttcccgctaccgggtcggtgtcctcggggccgccctggggttcgcactcaccggggtcgggcttgggccggggccgcagtgccgccgccgccccacgtcgcgcagcccggaccccgctccgcggaccgcgcggggaacagcgccgccgccgccgccagcgcggacccctctacctgggccaccgccgctgagaggagccgggcgcgtcgccgccgccgccacctttataggcccggacctgctctggccccgcccccgacgcaggctccgcccggcctcaccccctgcgcacgacgtgggcggagccagaagagggcgctctccgggaacccagtgcggctgcgcgctccggcggtggggcgtgtccgaaacggctagcgcacgcctgcgcagtgcggcgcacgggggtctcggtgcggaacctaggcagcgaccctgcggcgcgcccggagctggcctgtttttgccgcctgaggctcgcggggcccgtgggacctgcgaggccctgggccgtgtcctaccgcctggccccacacagggcaactcccttggcctgtcaacccaggcctagtataccccgactcccttggttcatgccctcgctctagaacctgccatggctccctcttgcagttctccagtgctggctccagcagtccccctcgtgcaccaccagcacgcttggagtcccagccactcccttctagtgctgggggaccagccaccgccacctactttcttcttcccctgggccaccctgcctggggagcactgagctccccgagtttgctttgtggttggcaggaaccagagtagagggtggggaccgaggtctgtgaaggacccttcctctgtcctcgaatagcatttcagggagaactgggacctgagacccactgggaaagagcccaaggggtggatggtcgccaggacaggaagtaaaacacagtcccattttggctggggccccaaaccaggcttagatagaatcagcctgtcctgagctgccagtcccccatcccacagcatcctggttcaaagtgctccccaggccccgggcctggggcacacaaggagtgggggttcccctgctgggtggactgtggtctcctcttctgcaggggtttccagaagcttcgcacagcccatcccaccatcccccaaccaggccctgagctcaagaggggctggagccccactgacctgaagctggagggcccctgcctgcaaggccacagctctcaggccacaggggctgggaggcctggcctcagccacccccggggcattggggggaagcctgtggggaattcccagccagaacccagcccagcacctggcattgccctgactcttggcaatggggggacagaaaaccaggtcccccagccccccttattgtgcatgtgggtgcgtgtgtgtgcgtgtgaacacatacacgcacaaacacacgttagctccaggtgccaactaggggtggagctgctagacctgcttgcctgggcctggctcacagagggcgcctagtaaatagtgcttggaggaaaggataagagtgtgtgtgtgtgtgcacgcgcacacgcgcacgtaggggttgtgtggtcgtgtgagcttcctggggccactgtaatgcaggaccacaaactggggggcttaaaacaacagaaatgtgtgctctcacagtcctggagcccagaagtctagaagtgtgggcagagctttgcttcctccaagtgctctaggaggatgcttcctgcctctgccagcttctgggggctctggtggtcctcggtttgtggccgcatcactccagtctctgcctcctcctctgtgtgtgtgtctcctcttcttattttattttcctttttttttttttttttttttgagatggagtctcattctgtcacccaggctggagtacggtggcacaatctcagctcactgcaaccttcgcctcccgggttcaagtgattcttctgcctcagcctcctaagtagctgggaatacaggcgcgcaccaccacacccggatagttttttgtatttttagtagagatggggtttcacc[137 bp omitted]ccaagctggagtgcagggacacattcatagctcacggcagcctcaacttcctgggctcaagcgatcctcctatcccagcctcctgagtagatgggacaacagcaccttgcctgctgatttttaaacattttgtagagatggggtctcactatgttgcccaagctgcactagaattcctgacctcaagggaccctcccaccttggcttttcaaagtgctggaattacagatatgagccactgagcctgctgtctcctctttttattttttatttttttttgagatggagtttcctcttgttccccaggctggagtgcaacggcacgatctcggctcatcacaacctctgcctcccaggttcaagcaattctcctgcctcagcctcccaaatagctgggactacaggtacgcgccaccacgcccagctaacttctttgtgtgtatttttagtagagacagggtttcaccatgttggccaggctagtcttgaactcctgacctcaggtgattcgcccacctgggcctcccaaagtgccgggattacaggcgtgagccaccgcgcccggtctcctcttcttctaaggacgccagtcattggcttagggcccactcagtgtgatctcatcttaacttggttccatctgcaaagaccctattttcaaatagtttctcgttcacaggtaccagggttaggacatggatgggtttttccgggagactcagctcagtccacagagtaagtgggaccatttcgtggtatgcggctgtggcacactgtccttggtgcaggtgtggggctgtgtccatctttcagtgtggaccgacatgggttcaacattcaccctgaccatgaggagcagacctgaaccaaggctcagcccatgcctgggctctgtgtccagccaagctcaggcaccagacaggaaaggctgatctgggagccaggccagaggggcaggtctgttcccggcaccatagccaggccctgccccaggtcctgtcctctcccacagccccagcaggtgggagccatcaagagcctcatgcgggccgggcgcggtgccacacgtctataatcccagcactatgggaggc[269 bp omitted]gaggcaggagactggcatgaacccgggaggcagagctttcagtgaactgagatcgcgccactgcactccagcctgggcaacagagcgagactccgtctcaacaaaaaaaaagaaactcgcgcagcaattgggaaaactgaggaagctcagagacaggcagatgacccctggctctagggatgctccaccgggggttcctccccatcgccctgtggacgttcaaggctcagtcatcctctggggtggggccgccctgggcactgcagggagctgagcagcgtccctggcctccacccactccctgccagcactcagccggtcacctggcttcctctcctcctcctcctattaccccagggtggagcccagaagacacccagatggctctcagagggacacagggagcctggtgccctgtgccctggtcccagctgatctgttccccaacaagcccttcgtttctttctgggggcgtcttttgggatgcagatcctggaaggggcatggccaagggaacttcctaggtgaaagggattctgcaggcaggactgagttagaattttttttttttttttttttttgagaggaagtctcgctctgtcgcctaggctggagtgcagtggtgcgatctcggctcactgcaacctctgcctcctgggttcaagcgattctcctgcctcagcctcctgagtagctgggactacaggcacgtgccaccacgcctggctaatttttgtatttttcgta[144 bp omitted]ttagtcgtgacaaccacagatatccccacgtgttgcccagtgtcccctggggacaggatctcccctggggtgagaccccctggtttaggggatttcacggaccctcccaagaaactctgcatcccgtgatgctctgacctggtgaggtcctgggaggctgcacacattgaagtccacaccctgagcagggagagagaaaggaggtgaatcccagcagtggggttccccctggtttacgctgtctgccccatggggcgtttatccgatgtctggtgtgagcagggagaaaactcaatattttccaaataatcgacaaggggtttgtcagcctcaacagtgtggacgtttgggcgggattgttctgtgtgctaggggctatgccaacagggatggggccttggcaccctctcctctcctttcctccccaacagaggcagaatcctctctagccgaccttctccctagaccagccctggacaggcagacaggcccaggctgggggcgcgggatggccagtggcctccggagaaggggagggtcgcccacctgcctgtgtgggccgtgcctggccctgccctgctgtgggccgtgcctggccctgccctgctttgggccgtgccagcccctgggggcgctaccaggctggccacccctgccagcctcgccccctgcccccacctccacccccagctggagccctgggagggagacccccacctgccttggtgggggaaaaagcctgcctggtgggaggcaggaagcctggtccgtgccccgggtgaccgtctccttgatcctcctgcagtgtggtctgggctggggcagtgagggtgggcactagccggcccggacgtgggtgggtgggacaggcagggcctggggccaggaccgcaggtccatgaccccagtgctggtcagccagcctgggagggagctcagggttgccctgggggagcaccagagtgaagaggagggcctgggagacgctagccccagaaggaggacaaacaggaaatgaggtgtggctgcggacaggaatcagcatcagctggagccgatctctggctcctctcctccccttcctccctccttccctcgtccccttctctccttcctcctcccctcctttcctcccctctcggtccttctctccctcctcccctcctcatccttcctcctctcctcccttccaccccttctctcctctcctcccctcctctcctcccctcccctccctcccctctcctcctcccccctcctcctccccccttcttcctcccctcccttcctgccctcctcccttcttcttcctcccctcccctcctccccttccccctcctctctccttccctcccactgcagttcaacccctgccccacctccagcacccagcacccagcacccggctgcaccactaccaaatccatagctgaaaaatgcccaatgcccccagacacaaggacagagacccccactccgccaacgcactgacatccctcccactctccagtgggctccccctgctgcgttcctggcatggccaccaccctgtaccgcactgtcttgcctggccctggggtggcttggaatggcttccagataacctgggacctggccagggtgggtggtggggggcagcatctccagcaggtggcttcttttttttttatttttattttttgagacagagttttgctcttgtcgcccaggctagagtgcaatgtcaccatttcggctcaccataacctctgcctcccgggctcaagcgattctcctgcctcagcctcccaagtagctgggattacaggcacacaccatcaacctggctaatttttgtatttttactagagacggggtttctccatgttggtcaggctggtcttgaactcccgacctcaggtgatccgcctgcctcagcctcccagagtgctgggattacaggcgtgagccactgcgcctagcctagcaggtggcttctttctctctcctaaccccccgggtcccccaccctggagccctcaccaggcctaacttggggtttggccgtggcttcctcttccgggaggtcacggcagggcccagccaaggccctggggccaaggtgaacccgatcctggctgggaggtgctgcggctcctttaaggaggggtcaggacctgccctggaccctgtgggcccccccaacccaagctaggcctggtggcttctcccagggcaccccagcccctcctcacctagtcaccagctagcctcattatctgggacaggtgagagttgaccccagcccagaacctgctttgggtgcacttggagcaggccaggcccagggaggtgctgatggaatggagccagaactggccacacaggtgggtgactgacctgagggtgtggtgggtcgggggatgtgctccaggactcacctgtggctgagctgtctctgcccaatttctggctttgaccccgacgtacagcccccatggacacccagtgagcacccagtgacccgcactggagatcccagctgtctgggccatgctggccccatgcccctctcctataggagacccccagtaaacctagcttcttctctggctgacccgccactggtcccacctccctcaacctcccagggccctggcagagtggcctggagcacacagaaggttcagggatgagctcgagttccctgcaggccggccctggggtgacccagacccctgcgccacctcccgccctcacggctacttcctagggtcccacagccactgggtggcacggccttccctccaggacagggacagactcctgcttacttcctgggacaacagacgccttgtgacagtggaggccgcaccacccaccccaccatgagactccagcggtggaggcccaaaggctcagcctgccccgggtcctgcagctccctggaggcgacctgtcctgcccctggtctcggagcaggcttggccggcctctgcccaaaggtgcacagcccccgcttccttgggggcaacctgtctgcctcctgccagcctttgagcgcttcctcaatctgtagagtgattctttttgctttttttctttagttctgcagaatgcagggcgattttcagcctgtgtggcatgtagggtgtccccaaagccccagaagaggtgcccaggcaggtcctgacttgccagccctgggcttctccctccacccatctccctcaagccagggaggctggccacacagcccaccctgaccacccccgaccacccagcacagggcccggctggatgtgtgcaacaagggatcctatggggggctccattgtctggaggctttttgtttgtttgtttgtttgttttgagacggagtctcgctctgttgccaggctggagtgcagtggctcgatctcggctcacggtaacctccacctcccaggttcaggagatcctcatgcttcagcctcctgacgacctgggactacaggcgcgcaccaccacgacaagctaatttttgtatttttagtagagacgggcttttgccctgttggccaggctggtctggaactcctgagctcaggtgacccacccacctccacctcccaaagcgtgagccaccgcgcccagcaacgctcagctaattttattttcggtagagatgggggggtctcaacatgttgcctaggctggtcttgaactcctggcctcaaatgattctcccgcctcagcctcccaaaatgctgggatcaccacgccaggcccagttattcactgtttatttgccattcaaagttagcttggtgtccgtattatatcagacaaccctacgggggcggggggcggtgacaataaagacctttcccctacaacataaaaaaaaaaaaacttggtgtgggtacgagtgtgagcagatcggggcgtgtgtctgtgtgcccgcggaggcaggcgtccctgggggaggccccaagcctaggtccttgcagggtcagccatgggcccatgtgggagtgaaaggtgggggtgggctgtgcacgcctgtacacacttgcaagtgtagtgggtggcacgagagaccacctcacagttcccacctgcttggctctccagggaccagaaccacggcccaagggccatcccttgctatgaagggccgtgggcagggtcatttcaggacccctgcggggctgagagctctggccatggggccacgaggcaggaatatctgatgtaagtggccgcaagcgtcccttcttgccggctgactcacactcactccactccagtggctcggcaggcctgcctggggacacagccagggcccgcggtcctccagtgggggcagggagtgggcagggcaggtgtggcctggagcctggggctgcctacctgcccgggctgtgggtgtctggccaggagcccggggcagccatggggccatccacgctgctctgacggagtggcatcaggagcagcgtgcatgccccacctccctggggttcagcccctgcacagtccccaaggaagtgtggggcagggctggcccaggagatggccaaaggccaccgccctgccccagtgaccgtgaacaaagcactccgctgatctcctggcgtcctctcctcctcctattaccagggggtggagcccagaagacacccagatgactctcagagaaccactgggagcctggtgccctgtgccctggtcccagctgatctgtctcccaacaaggccttagtttttttgttgtttttttgtgtttttttgagatggagtctcgctctttcgcccagtctggagtgcagtggcaggatctctgctcactgcaacctccgcctcccaggttcaagcaattgtcccgcctcaacttcccaagtagctgggattacaggtgcatgtcaccacccccggctaatttttgtatttactatttagtagagacggggtttcaccat[139 bp omitted]aagggcatggccagggaaacttccaaggcgcaaggcactctgcaggtgggactgggttaggattttgagatgggagatcaccctggatgatcggggagcccagtgtcctcacagggtcctcatgagaggaggcagccgggtgagagtcagagaccggaagaggctgctcttggctgtgagtgggaaggggcccaagctgaaggatgtgggcgcctctaaacgctgggaaaggcaggaactggattctcccctggagcccccaggagggaccagccctgcgcacaccttgatgttagcccagtgaggcccccatgtcgggtttctgacctccagaaccgtgagagaatcgatgtgggtcgtttcaagccactgcacgtgtgtgattcattgcacagctccaggaggctcacacaggcggtgttttcctgagtttccactgtgcagatgagaaggctgaagccagggcagccccggtcaagccccccggactgtcacaggtcctgggaggcgccaggggcagggagatgcggctgggggcgggcgaggccctgcagcctgggcatggggccggcccagggacagggccccctccccgcagggctggatttgctgcgtcgccaaatgccggggctgatcggctgctgggcgtgtgaccccgcgcctttgaaatccgcagagccacgggtcgggccctcccgccccgcccgccgaccgcacccgcgctaggccagtccccgggcgccgcctcctcctcctcccggcggccggggctctgggcgccccccacacggtgtcccggggtgacaggagggtcggagagcacggactcgggggtccgggccgcgcgccctgggaaccccctccccggcggcggccgcgcgcctgcgcactggctccagtgccggggcccctttgccccggggacggggagaggttgccggggcaacgcgtttgcgtcagcgaacctggcgcggcgcccgggctcagagggcgagggaggcggggcccgggctctggaccagtaggactccaaatatttagtgtgggggcgtggccagagatcacgctccagccaatggaattgttgttgtcggggccgcgcgatcagggccttgtgcctcttaaagggaccgtgcgcattactccacacttcgctcgccgctgtgttctgggcggaggcctagggctcagggttgggggtcagtgggcctggctgggggcagaggtaagggagggcgcagactcggagttggaggtcagcgggccgggcccagccccacgtcctcctgttttgcccgtttgtgtgactctgggtccggtctcggtctcccgagcttcagtttccgcaggtgcacagagctggagttgcggagttgtgggcgcgatgcattcacggctactcctcccctggcgggcgcccctgcatttatgcagcgcccacgttttgcactagcaccctatgcaacgaccggtctctctgcaggtcacagaggagctggggggggttgggggaccccagaaggtgaccaggcctggatgaccaggactgaaccgcaggccttggccctgcaccaacacctcttcctctgtggccaggaaacattccttccaaggacccctactggagggggtgggagggttggtcccccaggtcctccaggtcccgggcgctgtgcaactgagtgaaagcacagaggcaggtggtcagaatctgacccccagcggccacagccacaacccctcaccccaggcaggcctcactctccactgtagccctgatcaatgaatcacaagtgaggggcaggaaacgagattgaaggacccacggtgtagacagcaggggaggtgaccccaccaacccacccatctggcaccctctacgtcccaagtctggagtgtcccagtggcagccctcagggcatggataggctggaggcccggcacccctgccgaggctagcctagaagaatgggggtggcccctttggccatgggaagtggtacattcacagatcgcgggaatgacatgggcatctttgggggctgtgattcagccgaccacagagtgtctcaggcttcccccaaggatcccatcttcaccatgtaccgccctcctgctgggaccttggggtctcctgtctgcggccagcccaggaccctacgagttcctcattcctgcttctctcaggagagaccttttaaaggtctgcatttctctttgacttttttttccgcaatagttttcttcattatagaaatacacacgcagcctcactctgtggcccaggctggagtggagtggcacgatctcagctcactgcaatctctctccgggttcaggcagtcttgtgcttcagcttccccagtagctgcacggagacacccagctaatttgttttggagacggagactcactctgtcgcctgggctggagcgcagaggtgcaatctcagctcactgcaacctctgcctcctgggttcaagtgattcaactgtctcagcctcctgagtagctaggattacaggtgtgcaccgccacacccagctaatttttgtatttatttgtttttattttttatttttttgagacggagtctcgctctttcgcccaggccggagtgcagtggcgcgatctcggctcactgcaagctccgtctcccgggttcacgccattctcctccctcagcctcccgagtagctgggattacaggcgtgagtcaccgcgcctggcctatttattttttgagacgaagtttcactcttgtcacccaggctgtagtgcaatggtgcgatcttggctcactgcaacctccacctcccgggttcaagcaattctcttgcctcagcctcccgagtaactgggattacaggtgcccgccaccacgtccagctaatttttgaatttttagtagagacagcgtttcaccatgtgaaaggc[134 bp omitted]cagcttcccaaaatgctgagattacaggtgtgagccacagcacccagctttattttattttttttgagacagggtcttgctctgttacccaagcttaagttcagtggcctgatctcggctcactgcaccctcgacttcctgggctaacgcaatcctcccacctcggcctcctgagtagctgggattacaggagagtgcctccatccccatgtaatttttgtattttttagtagtgacggagtttaaccttgttggtcaggctggtcttgaactcctgacctcagctgatctgcccatctcagcctcccaaagtactgggatcacaggcctgagccactgtgccggccgctattgtcgtttctgagtgacatcatcttggcgatggttttgatttgcatttccctgacagcttgtgtgttccgtcttttctcacctggatgttgaccaacacgtgtgtaaatgttcaagacccacatattttaaaaagtaaaaagaaacagatgacattggctgggcacaacatggccaacgtggccaaaccccatctctactaaaaatataaatattagccgggtgtggtggcacgcgcctgtaatcccaactactcaggaggctgaggcaggagaatcacctgaacccaggaggcggtggttgcagtgagccgagatcgcgccactgcactccagcctgggtgatggagcgagactccgtctcaaaaataaaataaaataataaaaatagaatcttaaaaattgcccgtccttctgaggcctcctgcacagtcatagcgccctgtggccccgcggccaagcgggaggagcaggcaggggaggttgcttccaggacgccaggacactggctgcaggtggagagaaacaggaggggcggctgtggtgagccggggctggcatccacctcctggcgacgcgacctaccagggaccttgccaaggggcctcagtcagccttctgttgatgacacgctgaggtcaggaccagggccacagcctgtgtctgacaagaagcagtttccagttatttggtgaatcagtgctgggggcctggcctgaggggtccagggagtcacacctgactccatgtccctctttcccacaaagtaggagagcgccatgggtcacctgcccgaaaaggcaggtccatcctctgcctgcagtcagaactcagggggatccctgaggccggcagcagagccacgaggacgcagtggcctggcggcgggtggggcagcgcgggagctgctttccaggccagacagacggagccgttctcctgccggccttcccgggagcaggatcccatccagtgatgcgtaggcctgtggcggggacaaggagggcgggcagctgcttttgtttcccatctgcttctctggcttggaaagaagggcagacagctccagaaatatcgaggaacgtgggccacgcctccggggcggccaccaggcggtggcaccagaaggtcagcagagacagagcataaacagcagccacacaagacacccacgcgggacacgggccgtgtgcgcacatgggcacctgatgcctggtggccgagaggacagcacggcctgaacacccggcaggaggggacggatggtccatccacactggaacattatcccatgacgaaccggagccaggccacagcgtgaacctggaggacatcatgctcagtcacagatgccaaactcagaaggccacgcagtgtgtgatcccatttctatgaactgtccgggacaggcccatccagagacagggaggggatgtgtgggtgtcggggagtgacggctgatggggacaaggtttgttcttctcgaggtgatagaatgctgtagaattggaggtggtagttgcacacttttctgaatgtactacatgcgactgaattgtacaccttaaatg[143 bp omitted]atggcgaaacccagtctctactaaaaatacagaaattagctgggtggtggcttacgcctgtaatcccagctactcaggagggtgaggcaggagaatcgcttgaacccaggaggcagaagttgcagtgagctgagatggcgccattgcactccagcctgggtgacagagagaggctctgtctcaaaaagtaagtaggccgggcgtggtggttcacgcctgtaatcccagcaccttgggaggccaagggacgcagaacacaaggtcaggagttcaagaccagcctggccaagatagtgaaaccccgtctctactaaaaatgcaaaaattagctaggcgtggtggtgggcgcctgtagtcccagctactcgggaggctgaggtagagaagtgcttgaacccgggaggcagaggttgcagtgagccaagatcgtgccattgaactccagcctgctccgtctcaataaaaaaaataaaaaataaataagtacatacataaaatgtttattaaatcatttaccatgatttttaaatgttaatttgtattttatataatgtatttcagcacatgaagttttctgactaacgtatctt[243 bp omitted]cggcctcccaaaattctgggattacaggcgtgagccaccgtgcccagcctgtcccatatacatttggattcaccttgatcattaagactgcaattgctggccaggtgtggaggctcatgtctgtaatcccagcactttgggagt[136 bp omitted]gaggcagaagaatcgcttgaacacaggacgcagaggttgcagtgagccaagattgtttcactgcactccagcctgggtgaaagagtgagactctgtctcaaa[132 bp omitted]aaccctgtctctactaaaaatacaaaaattagccgggggtggtggcaggtgcctgtaatcccagctactcaggaggctgaggc[168 bp omitted]ctggctgggaacaatggctcacatctacaatcccagcactttgggaggccaaagagggaggatcgcttgaggccaggagtccaagatcagcctgagcaatgtagggagacttcatctctacaaaaaagaaacacaatcagctaggcatggaggcacatgcctgtaggcccagctactcaggaggctgaggcgggaggattgcttgagcccaggaagttgaggctgcagtgagctgtgatttgtgccactgcactccagcctaggcgacagagcaagaccctgtctgaagaaaaaattatatatatacataaaaactttgcctaagcttctgcttctgccagtctatgtctttgttacagcaattttatggggacatagttcacatctcataaaattcccccactaatgtatacagttcagggcggtgcggtggctcatgcctgtaatcccagcatttcgggaggccaaggtgggtggatcacctgaggtcaggagttcaagaccagcatggctaacatggtgaaaccccgtctctactaaaaataaaaaaattagccaggtgtggtggctggtgcctataatcccagctactcaggaacctgaggcaggagaatcgcttgaacccaggaggtggattgttgcagtgaactgagactgcaccactgcagttcagcctgggtgacagagtgagactccgtttaaaaaaaaaaaatgtgtatagttcagaggtatttataaattcatggagttatgcaaacattatctgaaaagaaaatgttttgtgttgatttttactggatatgaggggttcttcacattttaacaggaggatctttctgtatatttttgtttgtttgtttttttgagatggagtttcactctgtcacccaggctggagtgcagtggcagt[175 bp omitted]ccaggccatctttctgtgtatttctataggcgtccgcaaactttttcttttttcacttgatactcacctcaattaagagcagggatatttacatatgatcagtttattttttttcctaacactatttattgaaaatctttcaatgtcagctctctctccccacctcccccgctttctttttttctgagacagggtcttgctctgttgcccaggctggagtgcagtagtgctatctcaacttactgcagcctccgcctccagggcttaagtgatcttcctgcctcagcctcctgagtggctggaatcacaggtgcaccatcatgcctggcttggtcaccaaacttttactgtaaggggcagactgtcaatatttttggctttgtcgggtgcggtggctcacgcctgtaatcccaacactttgggagtccaaggtgggtggatcacgaggtcaggagttagagaccagcttggccaacatggtgaaaccccatctctactaaaaatacaaaaattagctgggggtggtggcgggcgcctgtaataccagctgctcgggaggctgaggcaggagaatcgcttgagcccaggaggcggaggttgtagtgagctgagatcacgccattgcactccagcctgggcaacacagcaagactccctttaaaaaaaaaaatggcactgtggagcagatggtctctgttggttaactctacagccacagacaatatgtaaataatatgtaaatgtatgagcatggctgtgcgccaataaaactttatttacacaacagactgtgtggctggcctggcagggtggctcacggctgtaatcccagcactttgagaggctgaggcaggtagatcacttgaggttaggagttcaagacttgaggtcaggagttcgagaccagcctggccaacatggtgaaaccctgtctctgctaatatataaaacattacccaggcatggtggcttgcacctgtagtcccagctactggggaggctgaggcaggaggctggcttgaacctgggaggtggaggttgcagtgagccactgcactgtagcctgggtgacagagggagactccatctccaaataagtaaaatttaaaaccacattgattttgggaggccgaggtaggcagatcatgaggttaggagttcaatatcagcctggacaacatggtgaaatcccgtctctactaaaaatacaaaaattatccagtcatgctggtgcacacctgtaatcccagctacttgggaggctgaggcgggagaatcgtttgaacccgggagggagaggctgcagtgatctgaggtcgcatcattgcactccagcctgggcaacaagggtgaaactccgtctcagaacaaacaaacaaacaaacaactaggaaacagcagcctctctggaaggcggttcccgatccccgctctttgcctaacaggagcctgtcccttcccagcgccgtggtgccctctaggggcgaggtgcagcagcacagcgctgacgggcacagggctaagggtccaccctgtggggcccgggctgcccctctctgccatgctgctgaggtgcaaaataccaaattcgtgagccaaagctggtcttccgttaggctccggactcacgacgtttcacgctggaagggaccccggagactcactcacccaatgcccacatttttcacatacagaaaacaaaaagcagctgggcacagtggttcatgcctgcaatcccacacttgggaggccgaggcagggggatcgcctgaggccaggagttcgagaccagcctggccaacatggtgaaaccctgtcactaccaaaaatacaaaaattagggccgggtgtggtggctcacgcttgtaatcccagcactttggtaggctgaggcaggagaatcacttgagcctgggaggccaaggttgcagtgagccaagattgcaccactgccctcctgcctgggcaagagtaagactccatcttaaaaaaaaaaaaaaattagctgggcgtggtggcgggcacctgtagtcccaattccttgggaggctgaggttgcagtgagccgagatcaggccactgcactacagcctgggtgacggcgagactgtctcaaaaaaaaaaaaaaaaaaagaaaggaagaaagagaatgaaataaacaagtcaataaaaagttgtagtgtacgctaatttgtccatgtccaaggccacagcgggctagggagtcacgggctggcctggactccaccccttcggtcttttccctctgatctgttccttggcacagggtaaaaacttttgtgcttcattttcttttcttttctttttttttttttttgagacagcgtcttgctctgtcacacaggctggagtgcagtggtgccatctcggctcactgcaacctctgccgccagggttcaggcaattctcctgcctcagcctcccaagtagctgggatttaaaaaaaaaaaaaaaagaaagaaagaaagaaagaaagaaagaaaagctgagtagctgtctaaaaaaaaaaaaaaagaaagaaaaataaaaaagattttctcagccccaaagcctgaggctcacccctaggacagggcaccctgttaacactggcaggaaaacgacaccatttattccgacgtctgcgtctgtagttttattccgtatctggctgggggagggtggtctccgaggtggatggagtgagggtggaggggacagagatggtccctgctcccacctccccgagcccacctgggaagctgcgtggccgggctgctggagacatcccgagccctgggggagacagaggtgtgggtgtttgggcttcatcttccaggtacaaggagatacatttcatcaagcagttcctgatttcatggagttctttgagggctcggctgggaggtccctctccggggggctccaagtgccggacctggtggtttctggaaggatcaaggacaagtcctgggagtttcaggcttcggcagtaacagtgtgttaattgcacttgttcgattttctggcagaagccaggagagacggggacagcgtgcttctcttcggtgaccatcccaggcgcccagaggtgaccagacttctgtgtggtctgggacagtgcagggctcaggcaggaaggaccactgtggtgaaaggccactgacaattctggtgaggagtagggtggcaggggttcagccagggagaggaggtggctgccttttctcagggccctgctctcaccttccaaaggtctagggtacacagaactcatggattttggtctcgcagccccaggggccacacagaaaaaggggttcaactggaagtttgcagcatctgggaaaggccaattctggcagaactggaagattccagaccaggggagaggcgtccagggagagaagagtcctgcttgggttgatcataagcaaagtggacatcgttccgaag[136 bp omitted]cggtgaaaccctgtctctactaaaatacaaaaaaattagccgggtgtgacggtgggtgcctgtagtcccagctgctggggaggctgaggcaggagaatggcgtgaatctgggaggcggagcttgcagtgagccgagatcccaccactgcactccagcctggttaggccgggtgcagtagctcatgcctgtaatcccagcacttttggaggccaaggtaggcggatcacctgaagtcaggagtttgagaccagcctggccaacatggtgaaatcttgtctctactaaaactacaataatttcctgggcgtggtggcgcacacctgtaatcccagctacttgggaggctgaagcaggagaatcacttgaacccaggaggtggaggatgcagtgagccgagattgtgccactggactccagtctgggcgacagtgggagactccgttcaaaaaaaataaaaatctcaagatggttgtaaatgtgactataaaaatcaaaccctttatgatacacaaaggggcccttaggaaatgagtcagaagccggggtgcaggacgtggggtcccaggagtccaggaagccctggatacagtcagctgaatgtttcggaagaacggaagaagcagagtgcattgaggaagagagagggctgggtgcggtggctcacccctgtgattccagcactttgggaggccgaggatggaggatcactggaggccaggagttcagcgagacccctgtctctagtatgaccaaaaaaaaaaaaatctgtagaaaaatggaagagattggggagggaggaaagaggctgcctgggtccaggttgtgcctctgtgtgaagagacaccagcggctgccagtggggagtgcggagtaaaggcctgcgggaggagatgtccgctctcaggggctcggaagcccctcagcctcttgcctccccaacgggagacatgtaggaggccgagcaagctgggtgcccttgagagacaggcccaggcagggctgtggccacagcagccctgggggctccccagcgaggtggaggcagaagttccaggagcctgggagccacccagggcaaggagtgaccctggaagccatccagcctcctggaaagtggaagtggtttaaaaacacagtgggcttttccggttgctagtaacacatagaattacagagttcacgttttagtcccagacgggagactgaggctcgagactgaggaaggcatctgccgtccggggttggagctcctgaggaccaacacctgctcagcggctcggcccctggtctccctgagatgctcaggccggagagaagcgggatgatggttccagagcgtcctcctccaagtctccgaggccccagcggcggttcgggcaccgggagacccgcggggctctcagtggcacatccgggcggtcatttctttctgtaaagagcaagcaagacatcagctcccaccagccactcctaaaaggggtgatgcgaacagcagacacacggagacgcacaggcagagaaacggcagctgggggcttccctgaacacccaaacaacaaaaaccacacaggcaatggcacacctgagaccaggggcagcaggctaccccatgaggccagagagtcagcattttcagatctgtgggccagacggtccctgtcatgatggctcaactctgtcttgtacctcaaaagccacctcagacgatggtaa[137 bp omitted]cacggtgaaatcctgtctctactaaaaatatagaaattagcctggcatggtggcaggcacctgtaatcccagctactcaggaggctgagggaggagaatcgcttgaacctgggagacagaggttaccgtgagccaagatcgcgccactgcactccagcctgggtgacagagcgagactct[169 bp omitted]gagggaggggaatcacttgaacctgtgaggtggaggttgcagtggctgagatcaaacaaacaaacaaacaaaaaaaccccagaaactttatttacaaaaacaggaagccaggccagagggctgcagtttgctgatccctgtcttatacagactgggacactagaaggaaagttctggaatacagaaaaaaagaaaaagaaaaaagaaaagaaaaagaaagaaaaaagaggaagaccccactaccatctttagagccactgagtatgcaactattaattttaaatttagcaaaatgtttaccagtagcaaagcctgaaaggggatgcacaaaaatgaggaagttatgtgaagatgtttttagtctttttttttttttgagacggagtttcactctgtcattcaggctggagagctgtggcgcaatcttggctcactgcaacctccacctcctgggttcaaacgattctcctgcctcagcctcctgagtagctgggatcacaagtgcccaccaccatgcctggctaatttttttttttcccctgagacagagtcttgctctgtcacccaggctggagtgcaatggcgcgatctcagctcactgcaacctctgcctcctgggttcaagtgattcttctgcctcagcctcccgagtagctggaattacaggcgcgtgccaccatgcccagctaattttttgtatttttagtagcgatggggtttcaccatgttg[132 bp omitted]tactggctgtcacccaggctggactacagtggcgtgatctcggcttactgcagcctcaacctcccaggcacaagcaattctcctgtctcagccccctgagtagctaggaccacaggcacgcaccactgtgcctggctcatttttttcattttttgtagagatgaggtctcactatgttgtccaggctgttctcaaacttctgagctcgagtgattctccctctttggcctcccaaagggctgggattactggtgggagccacctcgtccgtccatttttaaccattttttaaagttgtaagagagtggtggctcccacctgtcatctgaatactttgggaggccaaggtgggaggattgcttgcatccatgagttcagaccagcctgggcatcatagtgagaccccatctctacacacaataaaaaatcagccgggcgtgctggctgtggtcccagctactcggaggctggtggggtcccgctctcacatcaggatccccacatccatacagcgcccagcagcctggggaacaatgcagcctctgggcaggttccagtgccaggccctgaatcacgggcacccactccactgctggtccccatcaccgagacacaattgtgggccccaatttcaagaagcaacattggcttcagggatgtggaccccacaccgaggaatctggtccctgggttcgtctcccgataaaacctggtaacgtggaaagcagacaggctagggcagatgcagaggtacccggctggctacagaagtcgggtggaatctaggcaggtgcggtggctcctgtctgtcattccagcactttgggaggccgagacagggagatcacctgagttcaggagtttgagaccagcctggccaacatggcaaaacctggtctctactaaaaatacaaaaattagcggggtgtggtggcacgtgcctgtaatcccagctactcaggagactgaggcaggagaactgcttgaacccggaaggtgggggttgcagtaagccaagatggcgccactgcactccagcctgggtgagggaggcagactccatctccaaaaaaaaaaaaaaaaaaaaaaaggccaggcacagtggctcccgcctgtaatcccagcactttgagaggctgagatgggcaaaccacatggtcaggagatccatcgagacaatcctggctaacacggtgaaaccccctctctcctaaaaacacaaaaaattagctggacgtggtggcgcgtgcctgtaatcccagctacttgggaggctgaggcaggagaatcacttgaactcgggaggcggaggttgcagtgagccgagatcgcaccactgcactccagcctgggtgacagagtgagactccgtctcaaaacaaacaaaaacaaacaaacaaaaaaagtcggggtggagtctgcttgtgccggctcgcatccctttcataagggacactgagcggcgctctgggacacctgagctcaggacggtgaaggcggagtgagctggacgcggggcggcgcggaggaaactgcacctgtcgccggcatttgttccgtgggagaacgcaggatccctcccagctacctcaccacttgtcccatcagcagggtccccggggcccaactccagccggggccgccagctgctgggccgaccgcaagcagtcagggtcctggccccggaagggttcctctgccacgggccaccagccccaccgtaaccgcacgccctcagccccaagcccgcgcaccagtggctccagctccttggtgtcgatgaggccgaactccttgacgaaatagtagaagtgcttgtagcaggtgttcacgtgggcctcggagcccatctgcgcgatgcggtcaaagtggtggatgtagacgtgcacgaacacgcggaacagccgcgacaggatcttccgcaccgtctgcaggaagttcttgggaaacggagtgcctgcagggagaggggtgggacgggtccacggactcagccaagtccatgtccagaaccctttgctcctggatgt[135 bp omitted]gaaaccccatctttactaaaaaatacaaatattagccgggtgtggtggctcatgcctgtaatcccagctactcaggaggctgaggcagaagaatcgcttgaacctgggaggtagaggttgaagtgagccgagatcgtgccactgcactccagcctgggtgacagagtgagacactgtctcaaaaaaaaaaagaaaaagaaaagaaaagaaaggtacgctgtactctggagggacgtgccctaatgatcatcctcaaacccacgtttatggggtgtccctgagagccatgcagtgcattacacatcgagctgggcagggggtcccgccaacggggtgatgatcctggtgggcccaggggctccatggcagtgattctgaaaccactgagaacactgggcccagcactggcaggggtgcttgtctcctctgcgaaggactccaggcctgatgctgatcctgtcattctctgctttggggtgaggagacaggagtcaccaggagtgattcaggatgaaggggggctactaagagcagcccaacttaggagaatactcagaaatggaatcctttttttttttttgagacagggtcttgctctgtcacccaggctggagtacagtggcacgatcatagtttactgcagcctcaacctcctagcctcaagcgatcctcccaccttagcctcccgagtagctgcgaccaaaggcgtgtgccaccatgcctggctaatttttaaaattttttgtagagatgggatcttgctatgttgcccaggctgagctcaaactcctgggctcaagcgatccctgggctcggcctcccaaagcgctggcattacgggtgtgagccactgtgctcggcctccctgacttttctggaaggctctgtatccccgagcccctgccagctctgactcaccaacgttggtggggaagaggtcctcgttgttgatctgcgcctcgatccagtccatcagcaggtccatgtacctgggcgcggagagtgccgtgggcttccggaacttatgctcatcctgccagcggtactcatacttggggccccccgacatgacggggcaggactgctccgtgcagccgtcgctgatggtgccgtagatgaggttgacgcggttaaagaagtccaccacgtgaacagccacccagtcgttcaggtcctcgcccgggggcaactgcacggccagccgcaggtccagcccggcgttcagcgacgcctgcgccttcttgtgcagctcgaagcgctgggtgcctggctcaaacttgcgcttggggcggaatgtcttgtccttgttgaagacttgcttcaggaaggggttggacatcttggtgacgcctgctctcctggacttctgtagaggggtcctgggccagctggctgggggtgctgaccaacccgagaggccacgaaacactcaccaagccccacagctctcccgcggacctgaaatacacaggggaatcatgacctgctggaggcgacagaatttcccggaaactcgtgctgagggcacaagcggcaggattttgttttgttttttgagacagggtcttactctgttgccccggctggagtacagtggtgccatcacagctcactgcaacctctgcctcccaggcccaagcgatcctctcaacttagcctcctgaatagctgggactataggcacacaccaccacacctgggtaagtttctttatttttagtagaaacgaggtctcactatgttgcccaggatggtctccaactcctgggctcacatgatcctctcacctctgcctcccaaagtgctgggcttacaggtgtgagccactagtggcagggttcaaaacatcccctggacttttgactttaaggagtttcacccaaagggggccacctcctcagtggacagaagagaactgcgcgtggcgaggcctgaccgattcacagcagaaggtgcgcagagccgggccccaagagcccgcaggggccgcatcttccccggtgccgatgcctggcccggacctagacttgctgctacccagcactgtggggcttgagtgtggggcaggctgagatgccagtcacaggggactgcatggccggactacggcctccacaaaggaagccacaccgcaatgcccgcagcctgtgcatggcagcctaggtggaagaaggtctcaagggacgtcatcttggattccttgggtggccccacagtcagtgacaaacatcctcaggagtgaggcagatacgggggagacggctgtgcgaggatgcaggcagagatgggggtgctgcttccacaagcgaagggtcgcccaggatgctggccaccgccaggagcagagagaagcctggcagatgcccctcggcctcagagggacccagccccgcccacaccttcgtctcagacgtgcagccccagaactgagaatgagtccctatcgtgtcagcattctccccatgttgctgtgcccaagtcactggtcactgggtcagggaccccacgattgggtgacccctcttcccttgatttcatccacaaagacccccttccaggtcgggtcacatggcgagatgccgggtgattccaggggcagctgtccaccccaaggcaccgtataaatgaggaagcctccaggagccggcccaagtctcatgcacgcctgagcggtgacttgtgagacacccacgggttgctctggggtggggacccggcgtcctcctactcccctgagaattctcaggggacagagacagagtccatcccgcacagggcggaggggcgacctggatcacacaccgcgcgtgtgccgggctcacgctcaccacgcagggcctgtcaccgccaacaccgttattgtcactgccaggacgccggcaccgtggcaggcccagagtggatgcagaccccaccctgctctgctgggtgcaccttctggacgggcagagacttgactgtgacacttggggcaaggcccacgcagggtgctgggcagggcgggggtcctcaccacagcatgaagaggacccagcagaagggggagtcagagaggggagagggagtgaggcccacacatgcccaggcctcctgggctccacgcaacgctcacaagtaataaacacacattcatcacgttctagtacattccaacccccacctctttttttttttgaggcagagtctcgctctgtcacccaggctggagtgcagtagcgcgatctcagctcactgcagcctccacctcccgggttcacgcgattctcctgcctcagcctcccgagtagctggcactacaggcacgtgcaaccacacccagctaatttttgtatttttagtagagacgggttttaccatgctggccaggctggtctcgaattcctgacctcatctgatccgcccaccttggcctccaaagtgctgggattgcaagcgagcaccaccgcgcccggctgtgttgctgttgcttgtgacgaagtcctgtcttgtgtctcatccctcacgatacatgactgggcgagtgtttggggctgccatcacaaatcaccacaaatttcaggctgaaaacaacaccaatctagcacggggaagctctcagctgttgggaatggatcctgcagggctaaatttaaggtgtggacaggccgggtgcagtggttcacacctgtaagtactttgagagggtgaggtaggtagatggcttgcgtccaggagtttgaggtcagcctgagcaacatggcaagacctcgtctctacaaaaaaatttaaaaattagctgggtgtagtggcgcatgcctgtaatcccagaactgaggtgggaggactgtttgagcccgggagttcgaggctgcagtgagcctcgaaccccagcctgggcaacagagtaagaccctgtctcaaaaaataaaaaataaggtgtgagcagagctggatccttctggaggccccagggcttagggttagggtaccccccaacagtcaacagaacggcccccaccagagaatgatctggacccaaatgttcacagggcctgggggtcggggggaagagatgctgcattgtttgg[131 bp omitted]tctactaaaaatacaaaaattagccagacatggtggcgggcgcctgtaatcccagctactcgggaggctgaggcaggagaatcgcttgaacccgggggacaaaggttgcagtgagccgagatcacaccattgcactccagcctgggcgacagagcgagattctgcttcaaaacaaaacaaaacaggcctggcgcggtggcccacgcctgtaatcccagcactttgagaggctgaggcgggcggatcacgaggtcaggagttcaagaccagcctgaccaacatgatgaaaccctgtctctactaaaaatacaaaaattagccaggcgtgatggtgcatgcctgaaattccggctacttgggaggctgaggcaggagaatcgcttgaacctgggaggcagaggttgcagtgagccaaggtcgggcctctgtactccagcctgggtgagagagcaagactctgtctcaaaaacacaacacaacacaacacggtgcccactgtgaacgcagtgacgacagagtctgcaccataagaaggtccagggtcaatggtttgtcacaagggagcccctggtgaggaccggctgggggacactgctcagggcagcctgggcacaggtggcaggaggacttgagtcccacccacgctgcagtgaccagaaaggcctgaacttccccagcccatcctggggcccttagccaccatcgtcacttcctgccaccagggttaacacccaactaggaacttgaacttttcatctgcctgggacaaaaaccctgtctccactttacagatgagaaaaccagggcccagaaaaccaggcctctaacccctggctctgtggacatcggggttggatcgttctctggggtggggccgtcaggggcactgcaaggtgctgagcggcatccctggccgccgcccctccctgccaggagctcccccaagttatgacaaccacagatgtgcccagacatcacccagtgtccctttgggttaagattagatcgccctgggtgagatcgtggctcagatgattatgactgattctacagcagtgtctcacgccacagagctagtgggtggatcggctggggctcgaaccctggactctgtgggtggatcggccgggtctcgaaccctggactctgtgggtgaagccaccgctctttctgccccacaactccctaaattcagcaactctcagggatgcaggcagccgtctgatcacaagcctagtgacacacgcttcccgggccagcgctgctccaccacggggcccctccactgcctagcagagccacgtggatgctccaagtccagggactgctgacccatcttggttttgctcggcggggcacaaccccagggtcaccacacaggtccccccgcttgcttctcttccatttttagagacaggttctcgctctgctgctcaggctagagtgcagtggcaggatcatggctcacacttcagcctcgacctcctagctcaagggatcctcctgcctcagcctcctgagtagctgggaccacgggcactcactgccataattttttataattttttcaccaccagttaattttttgttgttgttgttgtattttttgtagagacgggagctcactatgttgcctaggctggtcttgaactcctggactcaagcgatccatccgccttagcctctcaaggggctgagatcactggcgtgagccactgtgcctggccacccctgcctgcttcccaaggaaggagtaatcccgcagcccagcctcagaccctccctgggaagcccctgattcaaagaggccacctctgtgcttatggtatcccccggggccggggagcccgggacgcatccacgctgtggctgagcaggtgggagctgttgggggggacctgaggcccttcgccagtgacagctcagcaccccagagccctgcacctgccccagtgatgagctctgcaagccacacctgccctcaggccacaccacctgcagcacaagatcaataaatcccctcaggagaagggaaaatgccggccacctccaggccatggtccgcctggcactgagcgagatgctcctccacgctgggaatcaatcacctcagtccccacatgcctgtctagatggggcgagtgcaggccccactttaccaaagaggaaaccgtgcaggcgagcagatccccatccacccagccaggcccactcacctccctcctccccgtttccgcttcacatctgggccgactcacagccaactttccaactccaacagaaatcacagcacagagcaaaacccaacctgccacagcctggtgctgccgtttgttgatttcagggcctcccatgccaatttgggggcttagcttccaaccgtgccacctggttgggcaggcggggccttccagcagtggtattgcagccctgggctgactgcagccatgggaggagaccccctacctgggctgagcctcagggagaaagcggctgttcccacaggcccccgcttgtctttttaaaactttttgtagagatagggtctcactacattg[135 bp omitted]gactcacaccaagacagttccagaaaacaagacagggcagcccgaggagcttgtaaacttcctcttggcatgtctgtctcctttcagaaggtgaggggtgccaggcgaggtggctcatgcctgtaatccctgcactttgggaggccgaggtgggtggatcacttgaggtcaggagttcgagaccagcctggccaacatggtgaaaccctatctccactaaaaatacaaaaaactagccgggtgtggtggcatgtgcctataatcccagctactcaggaggctgaggcaggagaatcgcttgaacccagggaggcggaggctacagtgagctgagatcacgccactgcactccagccctggtgacagagtgagactccgtcacaaaaagaaaaaggtgcaggattttcagtggaagttaacatcttctgaagaaccttgtggactggcagagttcccgtcacagcagacggttttttttttcctttttattttttttgagacaggatcttactctgtcgcccaggctggagtgcagtggcatgatcttggctcactgcaaactctgcctcccaggttcaagcaattctcctgtctcagcctcctgagtagctgggactacaggcgcccgccaccacacccagctaatttttgtacttttagtagagatggcgtttcaccat[137 bp omitted]cctaggctgctctccaattcctggcctcacgcaatcctcccacctcagcctcccaaagtgctgggattacagacgtgagccaccatgtccggcccgagcaaagcgttttctatcaggaacaaacacaggctccttggcggaggggtgattggccacagaaaggggtcttttccaaagaaaggccggggtggcctcgggaccctgactcccgccctcgttgtcccctgaggccgggggcaggttaccgtgtctggggctccctccgctctgctcttctcggattcctccaggaacagtggagaagacaaggcaggaatcagctctcagaattccacaccaaggccttctgggctcccccggtcttcccacggacgagacacaagtgacccttggaaacttctagagaaatgaaaggtgaaatgacaaattcccctgctgcaacactttttttttttttttttttgaacaacacagtttctctaagcaaccaactggtatgacccctcccccaccgaggtgtagcagctcacggaccacagtcacccacttccttccggaggtttccacatcctgccactgcctcggggaccgctgccccagagcacgggaggcgcctgagagacaagccctgagtggagaagtcagttccatatgttctaggtcagtgcacaacactggctcccggcctggcagcccagccctcatacttggctggaagatgctcccagcccagaatctgtcctgctaaaaaaggcgctgggcgcggtggctcacgcctgtaatcccagcactctgggaggccgaggtgggcggatcacaagatcaggagatcaagaccatcctggctaactcggtgaaactcgtctctactaaaaatacaaaaaaatagccgggcgtagtggtgggcacctgtagtcccagctacttgggaggctgaggcaggagaatggcctgaacccgggaggcagagct[135 bp omitted]ctttcatttatttatttttttgagacggagttttgctcttgttgcccaggctggagtgcagtggtacgatctcagctcactacaacctctgtctcccaggttcaagcgattctcctgcctcagcctcccaagtaacagggactacaggtgcccgctacaacgcccgactaattttgtatttttagtagaggtggggtttcg[136 bp omitted]tttttgaggtgaagtgttgctctgtcacccaggctggagtgcagtggcgtgatctcggctcactgcaacctctgcctcctgggttcaagcgattctcctggtcagcctcctgtatagctgggattacagacacacgccaccatgcctgcctaatttttgtatttttaggagaaactgttcca[140 bp omitted]ctggtaggccaccctcactcctgctggaggatggctgcgtcttccctgatcacccaggcgtgcatcctgtcactgttttgtgcttttgtctggtttacatttttgttttttttagagacagggtcttgctctgttgcccaggctggagtgcagtagtgcaatcacagctcactgcagccttgacctcccgggctcaagtgatcctcccacctcagcctcttgagtagctgggactacaggcacacaacaccacacctgtataatttttgtatttttgtagagatggggtcttgctatgttgtccaggctggtcttgagcttctggagtcaagcgatcttcccacctcagccacccaaagtgcagggattacaggtgtgagccactgtgcctactgcatctctgacttctctcgtgggaaagcagacaggcaggaagcaaggcctgcccaggcccctctgggccaggtgctatcgagggcttagcatactgtcctaattctcctgatagtcttttcttctgtttttagattgacatatgactcacatcccacacgttttaaccttttcagttacagttcaggagtacagttacgtgactcctggcacgtttggcgttgcgcaaacaccacctttatctaattccagaacactttcctcacccctaaaagaagccctggccagctgcagtggctcacgcctgtaatcctggcactttgggaggccaaggcaggaggactgcttgaggccaggagctcaagaccagcctgggcaacatagtgagacccatctctgtacgaaatagttaagaaattagccaggcatggtggatgtgcctgtatagtcccagccacttggaggctgaggtgggaggattgcttgagcccaggagatcaaggctgcagtgagctatgattgtgccactgcactgcagcctgggggacaaagtaagaccctgtctcaaaacaaagctaagatcgtgtcacctaggggacagttacagtgatgagacgtcacggacacctgtggtgcctgcttcagaggactcagcccaaagtttcaagagacaagagaccaagtgtcagaaagaggaagccacagggaggaacgccccaagctaccatcccaacccagggccacactcctttcacggaactttttcctaacccagggccgcaggatctgggcttgactgggcaccaccgacttggcaccgccttcttggcctcctggatggcttcagtctgaacgtgggggcaggagccatgctctgagcccgcccagtgggagccaggggcccaccccagtctcgcctcctcgtggccactgtgaagagctctcagccacactcagctgcagtgggggtctcacctggggggcgattctgcaccccggggactcatactgggtgatgtctgggggcatttgtggttgtcataactggaggatgctcctggcacagagtgggtggtggccagggatgctgcccagtgccctgcagtgcccaggataccccaccccagagactaatcagccttgaatgtccacagtgccgagggggacaaagcttgtcctgcgagtggcaaggccggggatctaactgttcttgtttgctttattttattttttgagacaaagtcttgctctgtcatccaggctggagtgcagtggcacaatcacagcccactccagcctcaacctccggggctcaagcaatcctcccacctcagcctcctgcgtagctgggactcctggcgtgcgtccagataatttttctattttttttcttttttgagatggggtcccgctgtgttgcccaggttggagtgcagtggtgcgatcttggctcactgcaacctccgcctcacgggttcaaggattcttctgcctcagcctcctgagtagctgggactacaggtgcgcaccaccacacccagctaattttttttgtatttttagtagagacagggtttcaccatattggccaggctggtctccaactcctgacctcatgatccgcccgcctcgacctcccaaagtgctgggattacaggcatgagccaccacacccggcaatttttgtattttttgtagagacgggggtcttgctatgttgtccaggctggtcttaaactcctgacctcgagcagtcctcccaccttggcctcccaaagtgctgggattatagacatgagccacggagcctggctctgtctccctctttaatgagtaatttttacaaattgccaacctcaccactagttagtacacagtgactgtagttgtcagaggctcaaacgtgtatctggccatccgtgtttctcctgctttctggggagcacttccctacgcactcataaactaaccctacaggggttcatgccgcagccctgtgaggctggcagggcaggctgaaagcgaatgctctcattcctgctaagtgatggtggacctttgctgtcattagtaaacaggcctggcatttgctggggccctggaggacctgctctcgtgaaactcatcatttcctggctggcgggaggggctcacccgtgctgcacgtccagaagctgaggccagttgcctcgcctgagggtgggaggtaaaaggtacaagtctgggcttgaactcagatccttcaattctgaatctgctgcgtctgccactagggcagcgtttccactctctgcactgtggacatcggcgtgggtcactctctggggaggggccatcctgggcactgcagggtgctgagcagcgtccctggcctccacccactccatgccaggagcacccccagtcatgagaaaaacacaaatgtcccagacttggcccagtgtcccctgggggcagaattaccctcaattgacacctcttgggttaggggattccacggacccccaagagactccgtggcccatgatcctctgctctgctgaggtcccaggaggctacacacattgaaatccacagagggggagaggaagagaatcccaggagctgaggtcccctggtttacaccgtctgccatattgggagtttattctggtgtctggtgtgagcagggagcagacttgatttttttttcccaaataactaatgcagtcccccacttggcattcagggctggatccttctctgggtgagtttgtcctgggcactgcaggtgctgagcaatgtccctggcctccacccactccatgccaggggcagcccctcctctagttgtgacaaacacaaatgcaccccccgcactgccccgtatttccaagtcccctgggggcaaaactgccctggggcaagacctcagctagattggcagcttcccctctgatctaatctaccagggactccactgaggggattctgggggccccgatacccgatccatcttagcccagccaagtccgcatccccagagctccgcagctgccaggcgcttctgaaaccagcatctgcagcccggcagagctggcatggtgactcaggctgccttggttctccagggcacgtagggtgcgactccccacccaggtgtcccagctcagcccatccctttgtccccggtgggaattgtctgtgcttggagtggctcacacccccgaccacttcctttttcttctcatttgcctcgtggcccagaggatgttggcgggctgagtcagggatagaccaccctgccccctgcccccacaggcctgaacacggtgaagattctgcccctcaacaccggacgatgtctggggacatctgtggttgtcaggttttgggggaactcctggcatggagtgggtggaggccaggaacgctactcagcaccctgcagtgcccaggacactccaccccagagaatgactcaatacccagggggagaccctggccccagccccacacaggaagtaacaacttcctccttccctgtgggacttatggtcaatgaaatacgacattaaacatagcaatgatacaaatacgttatttttttttttaagacggagtctcgctctgttgcccaggctggagtgcagtggcgcgatctcgtctcactgcaacctccgcctactgggttcacgccattctcctgcctcagcctcccgagtagctgggattacagctgcctgcaaccgtg[133 bp omitted]cccggccaaaatacgtgcattattttaacacacttttaaaactaataagctgaatataaagctctgcattaaagccagaagacctaagagaaaacccacaacctgtggggaagaaaagggagggaaacctccgtgaaactgacccctgcagtaagtaaccctacaaccaagattccagtgccggctgctggccagatcaggggaacacgcgcttcctgcagagtcattcccaagcccatctggctggaaagaaaagccttaaacttgagccaaaacctctcaacccagaggagacttctcatccttgtgtaacccaggacggcccggccacacagttttaagaagaatgagacacaggctctgacacggaaggacacccaatatccgataagtgcaaaaaataagttgcaaaacagtatggatacccagacctttttttcttttttggagaccgagtcttgctctgtcacccaggctggagtgcagtggcgcaatctcggctcactgcaagctctgcctcccgggctcaagcaattctcctgcctcagcctcccaagtagctgggattacaggcgcccgccactacgcccagctaatttttgtatttttggtagagacggggttcca[138 bp omitted]ggggtgcggtggctcatgcctgtaatcccagcactttgggaggccaaggcaggtggatcacaaggtcaggagtttgagactggcctggccgagatggtgaaaccctgtctctactaaaaatacaaaaattagccaggcgtggtggcgggcgcctgtaatcccagctattcaggaggctgagacaggagaatcgcttgaacctgggaggcggaggttgcagtgagccgagattgtgccactgcactccagcctgggcgacgagcaaaactctgtctgtaacagaaaaaaaaaagagaaagaaagaataataaattgctacaaccatgaaaaaaaataaggaactattgtgtctggaaggaaaggttttttttttttttttttttagctgcctgtttgtttgagatgaggtttcgctctatcccccaggctggagtgcagtggtgcaatcacggctcactgcagcctcaacctcctgggctcaaatgaccctcccacctcagcctctcaagtagctgggaccacaggtgcacgccaccacgcccagctaacttttgtatttttggtagagatggggtcttactatgttgcccaggctggtctcaaactcctgggttcaagctatccttctgccttggcctcccagagtgctgggatcacaggcatgagccatagcgcccgaccctctgtgaatctttgtggtaaactgacatacttttcccagtctgggtatataaggaaaaaaacagtcattttgatatactcaaaaggaaaagggggtgaggcgcggtggcttacgcctgtaatcccagcactttgggaggctgaggcaggcagactgcctgagctgggcaacatggtgaaatccagtctctactaaaacaccaaaaaattagccgggcgtggtggcgcatgcctgtaatcccagctactcaggaggctgaggcacgagaatctcttgagctcaggaggcggaggctgcagtgggccctggttgcgccactgcactccagcctgggcaagagaaactccatctcaaaaaaaaaaaaaaaaaaaaaaaggaaaagggaagaggccaggcatggtccccagaaggtattgtgtcaaagtctgaaagaaaacccaagttcagctttcttttgtgtgcagccaggcacacgctggaccacagccacccactgtgtgttccagagacttctctgggactccgaaaggcagaagtgaaggcctcctcccagaatcccgtttctgaagtcggatttaccttttcggcttaagccatttgaccttctaaatgccaggaaaacaggaacagagctcatcggctggggaaggtctaaaactccccaccttaaaaccccaagctcagtcagctgtgtggggaatttttctgaaacctccaccatcaggtccctaaggtgggaggatacctccttggaagggaatttttttttttttcgagacgttgtcttactctgttgcccaggctggagtgcagtggcgtgatcttggctcactgcaagctccgcctcccgggttcaagtgattctcctgcctcagcctcctgagtagctgggactacaggcacgcgccagcatgcccgggtaaattttgtattcctcagccgatgagctctgttcctgtcttcctggcatttagaaggtcaaatggcttaagctgaaaaggcaaatccgacttcagaaacgggattctgggaggaggccttcacttctgcctttcggaatcccagagaagtctctggaacacacagtgggtggctgtggtccagcgtgtgcctggctgtgtatttagtagagatggggttttg[131 bp omitted]tgcaaggcctccacagccacaggtagtaagctcagctccagagttaaaagagaaaaatcaacctgtggaaagagagggagctgggaagggtgcagtggaacgggtgttgcttgaggtgggtgcctgtgtcgtccctggggaaagggaaacacatccagggggtccggaggacagggacgtgacatgctgggatttcactttcttagttctcactctgtaatcggtagatctcagtgagttctaataaacaggtccctgacaactgcggttaagaacccggcttctggaagttctcagggctgcaactctgcaactc[136 bp omitted]gcttcgcctccagggttcatgccattctcttgcctcagcctcccgagtagctgggactacgggcacccgccgccacgcccggc[138 bp omitted]cctcttgcacttctgaaacaaccagcaaaccaaccaaccgaacaaataaacatccagcttcccctacatgaaagcaagaccaggcctggaaaggaagtgaatccaggagaacagaaacggaaggtgggttttgtctcacgggtcaaaacctagatcatcccacacacgcagggaaatgaatgactagttcctcaaggcatcactgtgggctctgacggctccagccttcagcagctcctcagctctgcgtcccagcgcctcttccgtaaaagggaagcccctgtgactgcgtgatgcacaagaaggaaggcggtcttgggaccacggcctagagggcggccagggcactccccgctgcctatgcaggaggcaactcccaaagcagaaagcacagatgggatgtgaaacacgcaaaacacaatgtcaacatttatccaaccatctgctttgaatacgggcagtttattgcatgtcaattaaacccgtataaactgttaa[148 bp omitted]actccgtctctactaaaagtacaaaaattaactgggtgtggtggttggcgcctgtaatcccagctactcaggaggctgaggcaggaggatcacttgcacccgggaggcagagtttgcagtgagcagagatcgcgccactgctctccagcctgggcgtgagtgagactccaaactccgtctcaaaaacaaacaaacaaacaaacaaacaaacaaaaaaacagtgtgtacaaagactggaaatcttacccccaggatgagctgcggcttggagcactgattttctgctctgtgactgcattttccaatttcccctcccctctcagtgactcctaataaaatgcaccctcgcttacactttctagcccctcttcgctgcagggaggaggggcagcttgtccctggcgggcgcctccttccggggtgggggggccctgccagcgactttggggaccccgagcaagaagggcctattcgaaagggcccgaccgccgcgttggcttggggatcctgaagccctgcagaattttaatccacaccgggaggtgcggggtcctgcgggagggcagcgggcagggccaggagttcacccccgcagctcgaccccgcaccctgtatccccctccggggtaatcggtctccccgccgcccgcgttcgcccctcctgggggatcggcctcctcgccgcctaagttcacccctcctgaaggatccggcttccctgccgcctgagttcgcccttccttttttcttttttcttttgttcttttttttttttcccccgctctggttgcccaggctggagtgcagtgatgtgatctcggctcactgcaacctctgcctcctgggttcaagtgattctcctgcctcagcctcctcagcagctgggattacaggtgcgcgccacctcgtccggctaattttgtatttttggtacagacggggtttcacc[142 bp omitted]cccgtctgagggatccagcttccccgccgccagggttcgcccttcctgagaactcggtctcctcgccgcctaagttcacccctcccgggcacccacctggccgcctctgccgcccgccttcgcccctcccggacacccacctgatcgcctctgccgcccgccttcgcccctcccggtacccaactggccgcctcggccgcctcagccgccgcaccgcctcgcagccgccgcggagggacacggccgcgggaacgccccacacgcatgcccgaccgcacccgcggaccggacctactttccttaaagggcccggggctccgcgcagaagcggcgtgcaggggtctcccagactcggtcccgcgggctttaaggggcccgggcggcgaaggcgcacggagccaagttccgggcagcagccctgggatgccctgagccgggccgggcggaggtctccgttgcctagcaaccggggccgcggcctgtgggcggagcctgcaccgtggctgcgacacggggcggggcctcagcgggagccggccgaggagcgggcaccggccattggcacaggcacgggccattggcgcatgcgtagggcgcggccttggggcggggcccacccagtggcggagtcttctgaggggcgggtcgtgggcggggcctggaggcggagccggcgccgtcagtagtcggctgaggacggaggcggggctgggcctgggatggggcggggcctgcgctggtggggcgggcgggggaggagacacggccaagcgcccgagtgggggccgttggttggtgcgcggctgaagggtgtggcgcgagcagcgtcgttggttggccggcggcgggccgggacgggcatggccctgctgctgtgcctggtgtgcctgacggcggcgctggcccacggctgtctgcactgccacagcaacttctccaagaagttctccttctaccgccaccatgtgaacttcaagtcctggtgggtgggcgacatccccgtgtcaggggcgctgctcaccgactggagcgacgacacgatgaaggagctgcacctggccatccccgccaagatcagtgagtgccggagcccagcccagtcccgactaccccgccagcgagaccccggggcaggccggtcacctggcttctcctcctgcccgcagcccgggagaagctggaccaagtggcgacagcagtgtaccagatgatggatcagctgtaccaggggaagatgtacttccccggtaaggggcgcgaaaccgaggcggggcccccccaccccgggacaccccgcccaccgcctgagcctgaccttctcctgcctcgacgactcagggtatttccccaacgagctgcgaaacatcttccgggagcaggtgcacctcatccagaacgccatcatcgaaagtgagcaaataaggcttcagaggagggaggtgttgcccagagcctcggagacccacggggcttggctgaggctggagtgatgtgaacagggcacctggcaccaggcagctggggaggagggcagctctccagggagggacccagcctagcacctgaaggatcaatgccatcaccccgcggggacctcccctaagtagcccccagaggcgctgggagtgttgccaccgccctcccctgaagtttgctccatctcacgctgggggtcaacctggggaccccttccctccgggccatggacacacatacatgaaaaccaggtgagcctgggccccagtgccgagggacaggccctgaggctttggagggttgggaggaggcaggactggggacaaggctgggcctggtaagatggcgctgtcctgccctcccacaggccgcatcgactgtcagcaccgctgtggtaagcaaggctccgtccaggctgaggggcgtgccggtggcagctcggggccctggaggctgaggggagccctggcggctcttgtacgtgtttcaggcatcttccagtacgagaccatctcctgcaacaactgcacagactcgcacgtcgcctgctttggctataactgcgagtagggctcaggcatcacacccacccgtgccagggccctactgtccctggggtcccaggctctccttggagggggctccccgccttccacctggctgtcatcgggtagggcggggccgtgggttcaggggcgcaccacttccaagcctgtgtcccacaggtcctcggcgcagtggaagtcagctgtccagggcctcctgaactacatgtgagtggggtctttgggtggcagcaagctcacctgggcctgggagggaacactggccacggccactcggcctcctgagtccaaacccactgtctttgtagaaataactggcacaagtaagtcccctcctcaaaccaacacaggcagtgtgtgtatgtgagcacctcgtgggtgagtatgtgtggggcacaggctggctccctcagctcccacgtcctagaggggctcccgaggaggtggaacctcaacccagctctgcgcaggaggcggctgcagtccttttctccctcaaaggtctccgaccctcagctggaggcgggcatctttcctaaagggtccccatagggtctggttccaccccatcccaggtctgtggtcagagcctgggagggttccctacgatggttaggggtgccccatggaggggctgactgccccacattgcctttcagacaggacacgagcatgaggtaaggccgccctgacctggacttcagggggagggggtaaagggagagaggaggggggctagggggtcctctagatcagtgggggcactgcaggtggggctctccctatacctgggacacctgctggatgtcacctctgcaaccacacccatgtggtggtttcatgaacagaccacgctcctctgccttctcctggcctgggacacacagagccaccccggccttgtgagtgacccagagaagggaggcctcgggagaaggggtgctcgtaagccaacaccagcgtgccgcggcctgcacaccctgctgacatcccaggcacgagggtgtcgtggatgtggccacacataggaccacacgtcccagctgggaggagaggcctggggcccccagggagggaggcagggggtgggggacatggagagctgaggcagcctcgtctccccgcagcctggtatcgccagccttaaggtgtctggagcccccacacttggccaacctgaccttggaagatgctgctgagtgtctcaagcagcactgacagcagctgggcctgccccagggcaacgtgggggcggagactcagctggacagcccctgcctgtcactctggagctgggctgctgctgcctcaggaccccctctccgaccccggacagagctgagctggccagggccaggagggcgggagggagggaatgggggtgggctgtgcgcagcatcagcgcctgggcaggtccgcagagctgcgggatgtgattaaagtccctgatgtttctctttgcagaagagttcttgttggggcagggggaagcctctaggggctggaggtgggcttctggggaggcctaaaggtcccagacagagcagggcaggtcctggccttgggtccacagccatgagggaccgacttggagccacactcacagggcctcagggagtgtccccggactcctaggtgtggggccgtggcccacctgagcacacatgggtaggctcacacaagcccacagagcacctgggttcttccacccaaagcgaggccacagtgtggttgagaccagggccagcactagtgcgtttaggtgttgcagtcacttacgtcagacccgagccaaggaacgcaggaactatgggctgtctcatctgtggcagtgacaggcgtggcatcatggccagagtcggggccacgacggcctgactctggctgatggggcctgacacacaggagggagggagtcgtgttccatctgtgcaggggcgcagctccaagtcccattctcactcgggcgacctcagcccggcagtctccttgcttcctcgagcgtccctttgctccggcattggggcggctgcaggacaccagcaagaacatcctcgagcacactgttgctgccaccatgggtcccacacactgtcttgtggccgcctcaggctcccgtcacgggaggggtgcacgggcacatttgctgaggtcaggaacggcgtgtgggaaggtcaccgagtgcctcccaggctccctgggacatgggagccacacgcatgttgggggagaatgtggtagtggccactggggacagtgtcaggagtgatggcgctgggtcctggctgtgaaggatgctgctttcgaggccggcaagcgtgtttaggtaacggcaaagaggctcgcggcaggtgctttcaaggcatggttttctagaaaggatgctggtgtgggccggggctggggtcccgtctgtgctgctctgagccccctgacatccaacgcccgccaccacggccgcgtcttgggttagagtggacaggggcttcccttcactgacccagcgtcaccttgctcgaggctcccgtcttcaaggtgtaaggctggtgtaaaggaggcaaattcacccaggggtggggtggctgctcttccgcggttctcaattctggatctgcccctgccccgggggctcctggggaaggggagggaaagcaggcacctgctcccctgcacggccttgggtggagatgctggggaccgaggccaccacggggtgggggactccctggcctgtgactgcccgagccccaggcctggatggtgctggggaccgaggccccctcccaagggcccgtgagctgaggtgcagaggctccagtcctgcagcgctgcatgacccaggccaggcagaagacccatgtggaaatgcctgttttacaactttattggatcatcttgacacaaaatcatgacagcagcgtgatatgtctctctctttatacgggaatgtcgatagcaaataaattcttatgtaacacatcatacaatttcaaatcctggaatcactgcatgggattctgtaatggattacatgctaaagtgacagttttcatcaaaaggagaagataaaatgtcattatctctgaagaagggtcagtcctgtgcccacgctggccgtggggagtgagcggagtctccttgccctgcctggtgggggctctgcctgtgaggtggctctcacaggtcctgcccaagggcactgggcacactccttcaacacagaacagcccaggtccgctgcttccaggccctgcctgggccttcctaagggtgctgggaaggatgtggggaaaccttggtgcgcatagtggcaagcaggggatgcggaccaccccaaacccaagccgagatgcacttctgctgaccaggaagacgggtggcagagaggcctcaacccaccccgtccacggttctgactgcaacctctctttggcgtccctggccccgccctgcccacagcctggctggcgcgtggcctgggatcccaagacccagtcaccagcccacgagcacactgacaatggacaacgcctggcaagaccgctttcccactgtgggttctgggagagaaaaccttggcgacagcggcccttccttcccctcccccggacgcaaccgtcaggacctttgggtcaaaagcaggcgaccccagaggaggccacgtcagccccgccctgtccaccaagtgcccctcacgtggtgcccatcaggccctggcccaggacaggagcccctgaagccacattcaaggactcggcccccagcgcggggcagggcacagacccaggtgggggagtcccttgctggtttgggggcgagaaggggacttcttgccaaagagaatgggaagagtcacagtaaaaaaggatggtcagataattcaacgcaacaaatgacctcggatgtctacacggcggacaacatagagttaaattaacactcaggcttgggtacagtacacacgactgaggagaggcgagacacgtcagggctgcggtccctgggtacgtgctccgcggggtggtgcggggctcgcaggcagctctcaacacttggccagcgtcgccttcatctcttctaacaagttgctcagtagcgtggagtcactgcacttcccgtcgactgagacagagttctcaccctgtgtaaggaaaaaagatggatattttaaaagtgtgtgcaggggctaggcacggtggctcaagtctgtgatcccagcattttgggaggccaaggtgggtggatcacctgaggtcaggagttcaaaaccagcc[135 bp omitted]gctaacagggtgaaaccccgtctctactaaaaatataaaaaattagccaggcagggtggcgggtgcctgtagtcccagctacatgggaggc[133 bp omitted]aaataaataaataaataaataaaataaaaataaaaaatgtgccgggcatcgtggcaggacacctgtaatcccagctacttgggaggctgaagcaggagactctcttgaacccagggggtggaggttgcatgtgagttgagatcattccaccacactccagcctgggcaacaagagcaaaactccatctcaaaaataaataaataaaagtacatgcaggccaggccggatggctcatgcctgtggtcccagctatgcgggaggctgaggcgggagggtcgcttgagcccaggagggtgaagttgcagtgagccgtgtttgcaccactgcacaccagcctgggcgataagagtgagttcctacctcaaaaaaattaaaaaacaaacaaaaaaacactatgtgcaaatattgcctcgcagctgtatgtgttgtccttttaattttgcgaatttgctaattattaaaaaaaaaaatgggaagggctcgggtgagggagcggcccaaggcacctgggtctcccgtgggaggggctccagcctacatagaagtgggagccggcacctgagggccctgaggcagccagaggcagccggggatgaagaccagaatccgaagagctcctgagctagcagacagttgagcactgtctgtccttccgccctcctgccactgggcccctgaagtgactgtggaagaagccagtggagtggggtaaccagagcccccagagagggaggtacgcggggaaagccaccccgtgaagctgctcacgatctgctaggctcactccatgctgcggatcccgttccaaagagcaaccgaaggcactgagtccagaggccgctgccgggtcccaaggccagggacaagaggcagcactgacaggagaggctgggcaggtggtggtgtgcttggggccacagtccccagaaggcaggggggacttgcagctgggacctgaccacccacgtcctccacaggatggaacaaggcccagaggctcacagcactccacggaaaacgaccaggagaatccactcatacagagaggccctcggcagaccccagtgccaagaccccagtgccaaggcaccaacaccaagacaccagtgctaaggcactaatggcaaggccgtcggtagaccccaatgccaagatcacatcacccagatgccaacaccaaggcaccaatgccaaggccatcagcagaccaaacaccaagacactaacacccagaccctaatgctgaagcaccaatgccaagaccccacgctcaagaccccaacaccaaggccgtgagcagacaccaacaccaagacaccaacacccagaccccaacgccgaggcaccaactccaagacgccaacactcagaccccaacgccaagacaccaacactcagactccaacaccgagacaccaacgctgagaccgcaacaccgagacaccaacactgagactccaacaccgagatgccgaaacccagaccccaacaccgaggcaccaactccaagacgccaacacccagaccccaacgccaagacaccaacacgcagaccccaacacccagaccccaatgccgagaccgcaacactgagacgccaacacccagaccccaacgccaaggcaccaactccaagacgccaacacccagaccccaatgccgaggcaccaactccaagatgccaacacccagaccccaacgccaagacaccaatgcccagaccccaacaccaagacaccaatgcccagaccccaatgccaagacaccaacacccagaccccaacgccaagacaccaatgccaaggccattggcagaaaccaacacgaagaccccaacgtgcagaccccaacaccaaggccatcagcgtaccaaggtggacggacactaggactctctgacacaagtttttttttttttttttttttttggagtctcactctgttgcccaggctagagtacagtggcacaatcagggctcaccgtagccttaaactcctgggctcaagagatcctcccaccccagcctcccaagtagcagggactacaggctcactgtactaatttcttagtactggctaatttttttaattttttgtagacctggggtcttgccatgttcccaggctgatcttgacctccagggctcaagcgatcctcctgcctcagcctcccaagtagctgggaccacagtcacacaccaccatgcccagctggcctaagctttaaagtagctgttaggaaaatgctccaacagatcaccagggcatcagcaaagacatggaagatacaagaagggcccagtgggaatttcagacctgaaaaataagaccctccctgtgtgggctcaatggcagaacagctaggacgaggcagactggtgagcttggcaagagagcaacagccatgaacccatctgaatacggcctctggggcgtgaggggcagcagcccaggctggggaggtgttgggagcaggccccccaaaatctggccataaactgaccccaaaactggccataaacaaaatctctgcagcactgtgacatgttcataatggccctaacgcccacgctggaaggttgtgggttgatgggaatgagggcaaggaacacctggctggcccagggtggaaaaccacttaaaggcattcttaagccacaaacaatagcatgagcgagctgtgtcttcagggcgtgttcctgctgcagttaactagcccaacctattcctttaattcggcccatccattcgtttcccgtaggggatacttttagttaatttaatatctatagaaacaatgctaatgactggcttgctgttaataaatgtgggtaaatctctgttcggggctctcagctctgaagactgtgagatccctgatttcccacttcacacctctgtatttctgtgtgagtgtctttaattcctctagcgccactgggttagggtctccctgaccaagctggtctcggcagggaggaagtgtgcagcacccaaaaagcagcaacagatcagctccagccgcctcaggcccagcagaatggctgccgtcagccgggcgcgggggctcgtgcttctaataccagcactttgggagtctgaggcaggcggatcaggagtttgagaccagcctgaccaacatggtgaaaccctggaaaccccgtctctactaaagagacaaaaagattatccaggcgtggtcgtgggcacctgtaatcccaactactcaggaggctgag[136 bp omitted]gaaacagggcctcctgcacggcagcaggcgggaaacaaagtgcagcactggggaagacagtctggcagctcctcaaaacctcaaacgtggcattaccacaggacccagcaatcacactcccgggtgtatattcagaacaaatgggctcactcctgcaatcccagcactttgggaggccgaggcaggcagatcacccggggtcaggagttccacatcagtctggccaacctggcaaaaccccatctctactaaaaatacaaaaattagtggggcgaggtggcatgtgcctgtaatcccagctactcaggaggctgaggcagaagaactgcttgaacctgggaggcggaggttgtggtgagcccttggctccactgtactctagcctgggtaacagaacaagactctgtttccaaaacaaaaaaataaaaaaaaacaaaagtactgaaggcagggactccaacagttatttgtttaacaacaatgttgatagcagcacaattcacaacagccagaaggtgggagcagcgatggatgagtggacacacagcatggtccatctgtacaacaaaatatgattctgctgtgaaaaggaagggaatcctgacagaggctgcgatgtggatgcaccttaaggacatgaggtgtaataacagcagccagacacagaaggatacattccgtgtggttccactcctaggaggtccctagagccatcagattcacaaagacacaaagtagaatacatggtgccaggggctggggaggcaacggggagtgagtgtttcatgggaggcagtgaatcaggagaaaactgaa[132 bp omitted]aaccctgtctctactaaaaatacaaaaaattagccggatgtggtggcgggcgcttgtattcccagctactgcggaggctgaggcagaatggcatgagcccgggaggcggagcttgcagtgagccgagaccgcgccactgcagtccagcctgggcgacagagtgagactccatctcaaaaaaaaaaaaacaaagcaagggtatcaaaaccacaacagacctctaggaacggaatgctgagtagtgaacatgagccagaagaaggcagagaagcgaaagaaacacgtgcaaactggaaatcctcagtatgctcccagagggcactggaaccaaaccggacatcaagaaaaattggttgtttgaaaagtgcaataaaggccgggcgcggtggctcaagcctgtaatcctagcactttgggaggccgaggcgggcagatcatgaggtcaggagattgagaccatcctggctaacacggtgaaaccctgtctctactaaaaatacaaaaaattagccgggcgtggtggcaggtgcttgtagtcccagctacttgggaggctgaggcag[136 bp omitted]gagaaccaggaaaaaagagacacaaaccgtgaccatcagaacggaaagtgacccggtatcatcacaaggagcagcgcgaatacggcacgcaccgccacgcgtcaactcagtgactgatgattccttgcgctaattctttgaaaagtacaaaactaccaaactcacccaacgtgaacggtaacttggggattcctacaactgttaaaacaaaaaactgaggatgtagctaaaagcctgcagaaaaggaactccccaggcccgatggttttctggtgaattctgtatacacatttctttctaaggaagaaatgccacttatcacacagtctgccccaaaacagagaggacacactctactgcacgtctgatgaagccactggatgacaaaaccaaagaagccaccagaaaagaaaactaaagacccaactcctcatatacagacacaaaagccctcaacaaaatattcacacactgcgtttggcagtcgacacactgcgaagacaaccaccctgcagtactcaggagagggaggcccggagcggagggagcgaggagtcattctagaagcgcagcagtgagaggtggagagtccgaccccagggccttggctgccttgtgcacaggggtggggtggtgggcaggagtgcagtgggagtggggcccctggagccatgtgtcagcctgcggtgagcagcgcagcaggaggcagaagccctgtcttgctgagggagagtctgtgctgctgagtggggctggcacaggtgaggggctcatggcagcagtgctgccatcactgtcctcgagccctctaagtcccaaagcgcgcctctggggatgaaggcctgggcatgaccccaggagaggtggcaggagccagggtgtgcacagcagcccgaggctcacctttttcaccaggaggcagacatggtggccctggatggagcggctgtacatggaggcgcaggagtccactcgctccacaactgcaacagagcgggcagtgttaggcttcccggacattgcatggctgcagccccacccccagagcaggggccaccttcttgggctgcccttggccacagcttcaggaggcctgtaggagcagggtgtggccctgagaggcctggggtgtggggaatgcagcccccgcaccagctcccaggcctcggggccaccagccacccgggatcccaaagggtgtgagtttgggtgggagggccacaggcccggctccaataggaagggacagctgccgcgtgcgtgaaagccccgtgcaatccatcagcccctcactctccttaccggaaaaatggtggtgaaaacagatcttcgccagaagattctggaaggacatccgaatgccatcgactttgattgagctcatgctcaagtccccagactccagcaacttagcaaaggcgtcactgtgggagggacagggaggctgactgcggtggggccgggctcctcaggcttcctggcacagaggccaacaaaacctgccacacacgctgcgcttggacaccctcctgtgtgtctgggccgggaggtcttgggggtcctggaaggtgtggctcattttcatgtgcggaagccgtcacacccagaaactgacaatgacttgtctttaaagaggtcacagaggtgcctgaagccatgggatgggccctcctccgacaaggacggatgtcctgtaggaagggactggggggataggctaggatgcaggcacgcagaggacggcctgtgaggactcaggggggagggggtgccgcacgccaagccgtgccgaggagaggcttcaggaggagcctgccctgctggctccttggtctcacccctccagccttcaggacttccaggggcctggacctctatgggtgacgctgcctggcctgtggcttcaactacacggccccggctggcgcagacaccaggcagcctgacctgcaccagtcacgagccagcgcctccaaatccgtctctaaagtcctgcccagaagcctcagtccccggggcacaggtgtctgcaaggtagaggggaggcggagggggttcggggacataggggagtgggcctgggccccacctgtagcagggagtggtgatcaagtaggagctgcagctgaagtgcagcctgaagtccagcttctcgtgggtcgcaccctcgtcattctgcggtggagtgaaggtggtgcagttgagaggggagtcgggcccagctcagggctcagggttccccaggcaggtggcccacttcccctagggacacctggacacccactgcgatggggcaggaggagcccctgcctgcagagtcggctcttcaacgccaagtggagccctgcataccttggcaatgaaggacagggtccccttgagcttctgcgccatgacgatgctctggatggtgaacacatactgggcttcgttggagacgcctggcgggggcgagagggagtggggcctgagacgctgcgggggctcagcatgggtggggcctccaggtctgtcctcagtcccaagtcctctgtggctgattaggaaactgagctcagcccccaagggagcaccaggggacaggagcagaaacaagaggctactggtgtccctaatttggcctggacttggtcccatccctgtttcagagggcagacttggccactggaaccgtggaacccaagaaggccccagaatccagcccccagcacaacccttgggactctagccaggtccatccgaggccattgcgcttctcagagagctgtggcgagaccccgacactcaggaggtactgaggtgcagcctggggacaaaggggacatggggaggaagcaacaagaaccagcggatccgggcagtcaccagctgccactgcgctcccacagtccccaggagaggccgtgagtggggcagggctcacctgggggcagctggaaaggcacggggacgccatcgtggacggaggagccctgcggccgggccatcctggcattgagtgagtccagcacgctgagctccatgcccttgaggatgctgctgctcctgttctccagcacgatggccacagtgacctggctgtcctcctgcagactgccccggatgtcacaggtctgcagggcatggccagtgttagcagggcaggcgggcccgccacagggaacaggcacagccacctgtctcttaatgaccacagaggcagcaggggtcccacaggcacaggaaggcacggagaggggcgccccctagccgcaggccaagcgcctcctatggctgctctttgagtgcatggcggggaccctcctgccagtccaagtctcagggcatgtctccaaccttaccccaagccagaggtgctgcccaagcaacgcccctgccaggaatcacaggccctgggtataccaacatccgggagctgtgggggctgcccgggttccgcgcgatcccatgccaaagagtgtgggctggcccaccctgcccctgggagcggctgccactcaccattttaacataggaattttcagcgaggagggagtagctggactcaggctggaaatagaaaaggcgcatcagccttgggggccccgagctccgtctcagcgaagactccagtatggcccaataccccaggtcgaatgccacgactccaagaatgcttggggcaaggggcttcaaaggagccgatgagggatccccggctcccaggaccacacagcccaccacgggggtgcctaatgtggggctgcgggccagggccagtcccctgcccccgccaggctcggcttcttctcgaatctgctcagttctctcccgcatggaggctgcaggagtggggagcagcgcacagcccgccaggaaccccggcgtggggcgggggcgctgaagtacccctcaccgggagctgctcctcctctggcgcgccattctgcaccggctcccccgctgcctcctcgctgcctggaggctgcttcttggacttcttcttgcctttggtccgctcctccttctccttcctgtgcttcttcttcttaggcttgggagatttctggagcaagaggagggtcgggttcagtgcccaggctgctccagcacgcccccatcacagtgtgaggtcaggatcacagcagggctgctcaggctgagggtcccacgtgcctgggtgggatggcaggaccagccacgcctcaggcctaccgggacaagctcaggccagaccaggcccagcggaggctggggccgtctctggttggcggcaagcgccaaagcagcccggggaacagtccccaccgaccagggagccatgcagggcaaaccagtgaggacaccacacttgacgcagcaaccccacgcccatgtgcacatccgagagggaacacacacatccacgcgcactgcgcagatgttcaaagcggcatactgtgtcaccacaaaggggaagcggcccaagtggctatcaacagatgagtgggtcagcacagtgtggcccatccgcggaggaacggggtcagcagagggtgacctgtccacgcactggaacatgacccggccacgaacaggaaccaggctctgacccaagccatagtgtggatgcaccttgaggacatcacactcagtgagacgccacacacaaaagaccacacggtgtatgaccccatttctatgaaatgtccaggacacactgatccacagagacaggaaggggatgcgtgggtgccagggcagggaagggagtgagaagtaacggctggtgggaatggagcttctttaggggtcatggaaagttctggaactagacagaggtgatgatggttgcacaactctgtgaatatacagaaaaccactgtatacatacttcaaatgaataaactctatgagacttatgaaccatgtgtgaataagaaggttattaaaaaaacacaagaccacaaccacaacaaaaggcccgtgagaacgccaacacaaatgcgagagcagggctgccctgggacctgggtggcggaagctgtgtccggccccacgttggggtgctggggctcatgcagccctccacagcccctgggggagtgacagcctcaccttgtcctggtcttgcccctcggcatcgtcctcctcgccctgcgcctccgtcttggcgtcctcacactcgtccttcggggtagtgacagtgttcacactgagctccccctgcagggagccagggcttggggctcatgctgggcaatgaggggccccactccactgcaccccagacagcctccatgccacacaccctcagcttgccctcacgcctgcctgagaggccacagtgccctccgagtgacagggagcctgtgagcacagaggccctggctgtcctccccttcccctggcccctgcttggcccactgggacccgggagcatgaccccggctccactcagtgctgggtcccacaggtgcacggtgctgaccgcgagagcacagggcctcaggagacccagggctcttccctgagtgccaggtatgacctctgcagacaccgaggctggcactggccagctgccagtctcttaccgtggatggaacgggggcgggggcgggggcgggggcaggcggtggggtggtagacagccagaagtccaggtcctcagcctgaaaccacaagacaggctgtcagcaaacgcagtgcaatggtcctgggaagaggggacggggacagcagggccaaggaggccccagctgccctcgctgcccccagggtcctggactagctgggccttgcagagcctgggaatccaggagctgaaggcgatgtcctcagccagccctgctggctctggctttcgctgccagaagagggccggggacaaagctgtgggtgggtgtgtgccattccagtggtcagaaggcccgtggcggcccatatgtcttatgtctgcctgggccacctgacgtgggtgtggacaggctcccaggccctgcaaacacatgctcctttgaaaaacccatttctttctctatgtgaaaatctgcacacagacactgcagaaacggttctggagctgcacgtgagggtggcatctggaccacgccgagctctgaccatgtccccccaacacaggtgaggacacggctcacccatgggatcgttgggtcctcctcagtctcccctgacacaagtgcacagtcagctcccctcagaagccacatgtcctcactccgccggggcacagggcgaggcggctggcactcgctgcctgactcagactcacagccatttcccctgagctcaccgctgtctcctgggagttcacggcaagggaggggaatggagaaggccgccgccctgggcactagccttaccttcttctccttctccttcttcttctccttgtctctctctttctctttgtgttttttctctttcttcttgggtttcttgctcttcttttctaccatgggaacgtccttctcaggggattttgaggtctcggtgtttctgtgtttctgaataggcagtttctcgctgtcggctaagggcctggaggaggaatgaccgggccacacatcagcaccactggccaccccccaggaccactcagtacatgccgtgtccaagcatgtggcagtgcgggacctgctcctccagcccctggccccagccatggcccaacatagatctactcaacacagcctgctggaggctctcatgggagggtctgtggtggccacaccctgccctgtcaaggcatggagacctcccgagcaccccaggcctggagacttcagagtccacacttaagagtcttggttgggagggccagccaagagcagtgcagtgaggacgtggtctggggaaggcccgcccgcaccccaccccagcctgcccaccctgcagagcccggccccacccggaagggaggacgagaggaagggaagcaaccacatgtggcctccaccctcaccctgaacccatatggactcacttatccaggtcaatatccagagccctgtaggggtcgttggggtctttgtcatcctcgtcgctgggcagagcattctgacaggaagagaggaaccccatcactggaacccgcccttgtggcctggtggaacgccatctatctgggacgcagtgggactgcccatgcgggccacacgcacaggtgggcagtgacgtggctccaccagaggctccgctcagcgtctaggcactaagggcggctgggccccaggacgcagccaacctgcatctgcctctgaagctgctggccctggggcggtgcgtcgggacgcgtgctcgaggacagagaggcctctcctcctatgctctccggggtggggcctcatcccagccaccaacgaagaccatggggagaggccactgtgcatggccccaggacacacacatgcggaaagatagacatcctaggaccgggacctccagcgaggctgacctcaggcatctcctctgtgacgatgtccacctgctgggcaggggcgatgtcctcgtcgctctccgtgggcagcgagctgtggcggcgcttgcccttcttctccttctccttcctctttttcctcctcttgtccttctccagcttctgccggtgccgccgctcctcctccagcttcacatactgatctgacataggcagccctgcgggccggcagcgggcagccactcagcactgcaccccaggggctcacggggagggcggcgggagcaccccacagcccatgtgacaaatgcggcgccgacacaccggagacacttgcctggaaccttcaaggggacggagaggtcaatctgcaccacgggaatgtgctccacgcccggggtgtcctggtaccgctgcaaaggcaacacccaggcgttaccggtgcaccgaggggtgacacacgtgcaagacaagcctcggggatgcagggagcgtgacgcagccccaacatcctaaggagctggggtcctgccagagccctgggccgcgaggagcgccgtgagcgagcgcatcccgaggacccgactctttaagacagtgaggactggaaagcttgtcacacgagtgaccccacaggcctatgagcagagagaagcaaatcctcgttcactttttttacgtgaatattctgttttctcctcaaatgagaaaagtaatgcggcctcaagcccagagtgaggcagcaggttgcccacgaccgtggggtcagggctggacagcagctgggctgccaggcgcagggaacagggccccccggctggaggctcgaatgaatggggcccacagggaggcgcctgcccctcaaaggctccgcacagtcaccgtgtggccccagctccattcccaggatcttcctgagggaacccgaaactcagatggatgccgcggggctcgggtggtgagggtagagggtgctgagggacaggcacccggggacgggcctcaccttctgtggcgatggcgagctcttgatgtagaaggggttgttggcctgctcctgcttccgggcctctcggcgctgtgggacacagcttggcatgagcccgagagaagcgggcaggatacccctctgtggacgtccaccaccagccacccagctggggaaggctggatctctggctattttcactactgagctttcactaacagggaaaccaaggcccgcaattgggaagagcacgtattgggggaaaaggaatcgctaacgctctgggaggcagggacgcccatgcctccactgccagggtcagggccaggacccacagaggccgctgacctgcctcaaagactccctgggacaggagggaggagacgagggctcgccaggggcagccagcagctcacccgagccagctcttcctcgtccgcctccgacggccggtgcttgggacgccgctgctcctcctcgtggaagacggccctgggcctctcgtcctctgactcgctgtccgagagtggctcattgatccaggcgtccaggtccaggctgcaccggacaggagggccacacaaggcagtgtgtgaccgagcacgcgcctgcaggcgtccgccctgagcaggctcaccacgtgcctggccatgtgatatcccaaacagtggggcctgccacccacacagggccagcgaggcaggtgtcactgccccttaagaggacgcagggacccaggaagactgcggcagggtcacagtggggcccccacggcaggctcaggctgcctcagagctttatggcaagggtgggagcaggcccacttcgcagggagcatccccaggcagaagccagatcccagaaccagtgagagacctggtgagtccgtgtgagggatatacccgcctgaggcctccaatcagccccacaccctcctggctgttcaggggtgcaggagcccccgctgtgccaccaggcatcaagggaccatgtcagggccatggttgcaatgcccccacccccgtatccttacccttcggggactggaaccttcttctgggccttgggggccactgggttcagctccccagcaaagagagcgctgacctcctctgccacaggcacgtccttggcctgaagcttctggatgtgcttgaccagctgcaggatgcaggacgcctgtgggggacacaggggtcactgctggcacctgcccggaaggccactcggccaccttcagggacacggggtggctcagcccctggcacagtgacgtgtgggccccctggtacagccacatagccacagagagcccagccttcatgccgtctctgtcgtcatcatcctcgccaggaagcggcagaaacagaccagtccggaaacagaacagagatgggggcacaacagggagctttgcccactgcagaaatgcctcccatcaggtcagtgccccgacaccagaagcaccacctccctcggcccccgcgggctccccgcctctgtgctggctccaactcagacacagccaggctgggcagctccaacagtgaccatgggccaaggatcatggccagccccgagctaatgccaccgcacagaggagcccggggccacgccccatgcagccttgaagctgggtctcctcagccattggacaggctgacgccactcccgacctctctcacagatggccaggtgcgatggttcacacccgtaatccttgcactttgggaggctgtggagtgtggatcacctgacgtcaggagtttgagaccagcctggccaacaaggtgaaactccgtctttactaaaaatacaaaaattagccgggcgtggtggcgggtacctataatcccagctactagggaggctgaggcagaagaatcccttgaacccaggggatggaggttgtcatgagctgagatcgcaccacttgactccagcctgggcaaaggagtgaaactccatctcgaaaaatcaaaacaaaacaaaaaacaagcagaaaaacagacacctgggaagtggtgggcaccgcctggcacaggtgtacagtctgctcaacctagaacccacgtcacctgcagccaccagaaagagccactgccagccccaggctctcacacctgctgtctcgccgcatgtgaaacaacctcttcctgtggccaggagcagcaccctcacatacccagcaccccagagacctgccccagtcctactgacggatcccccgtcctgctgacctccaggtcccactgactaaccccaaaccccagctggcacaagtggcaacaaaagaatctcagtgagtggcttcggaagaggaagcgaggccccgtcgacctggccgccactggacagaaaggcactgagggctccctgaggctcggcccaacacggagtgttggatcttacccgctcctgcacctccaggtctgcgctctgcacaaactggggcagccggtccaccatgagctgggtgacggcctgagcgccctctgcctccccggcctgctccttctgctgcaggatggaggcgtagagcttgaccacgttctgcacatacacggcctggatgtggcctggcagcgtggtgactctgggccgcagcatggcctccaaagtgtggtgtggttcctgcagatgcctgaggacaggaaacactgtgagcccccaggatgccaatcccggggctcctctctagcaggtgaggacctaggaggcctgggctcgtcaccaacaaggtgactctgggcccttcccattccctgagcggtctccaggggctgagacacgaagtagaagaaaccacaggccgtcaacagcccgtaacacaaacaaggcagagatgtggagatgacagagccactgaatggaggaaaggtcagaagaggaaaaaggacaacggggtcaactgtgcagctggccctgggaggataagcaggatgggcagggaacagacggaaccgggagaccctgatctgtgggacagtggggcctcggggtgcgcctcactggcgtctgacacaatgccttgggacttgaatatgtttctagtccacttttttcccaataagaaaatgatagaagtggccgggtgtggtggctcacgcctataatcccagcactctgggaggccgaggcaggcagatcacgaggtcaggagtttgagaccagcctggccaacacggtgaaaccccatctctactaaaaatacagaaagtgagggcgggcacggtggctaacgcctgtaatcccagcactttgggacgccgaggcgggcggatcatgaggtcaacagatcgagaccatcctggctaacacggtgaaaccccatctctactaaaaaatgcaaaaaaaattagcagggcatggtggcgggcgcctgtagtcccagctacttgcgaggctgaggcaggagaatggcgtgaacccaggaggcagagcttgca[137 bp omitted]aatacaaaaaaattagccaggcttgagcttggtggcaggtgcctgtaatcccagctactcgggaagctgaagcaggacaatcacttgaacccgagaggcagaagttgcagtgagccgagatcacgccactgcactccagcctgggcaaagcttgggagatagccagactctgtctcggggcgaggggaaaaaaagaaaatgacagaagtgctcatctccaggatgcaggctggctggggaccctttcgggatcccagaagtcaggcgccttcctgagccggggcaggcccagggtggggagtgctcggtgtggccgtgatgagcagcaggtagcggccagtggtggtgatggggccgggcccgaggcagtgaggcatagcagcaaatctcataaatttccaagagagcctggaaatccagactgctgtgagaaccgtgagtctcagcaacacattcccacctccaggcaggcccggtgacccgagcctgcccagcagtggctgtgatctgtcctcttggccagggagaacctgacattcctggagacggcaggggcagtgtcgataagacccatccctgcggcccacctggaacctggcactgagacccctgtgcctccagaggggcctggcgcaggcaggctggggctgagcaggtgcctccctgggccacctaactgccacacggagctcccacctcacctacagcaaacagggctcagaagggctgccacgcgcccagctggaactgagccttgcagatgcccagggccagccccccgtctgcagcccaccccatggatcctcccacctcccagtcctagtgcccacgggatctacaatctcctgggaacgccacagatgcccgagggcagagggcagacagggcagcacagactcgcctctgtaaagggggaatgggcccgaccattgtcaggggacaggtgctggaaacccacggacctgcaagacggccggggtggcagggcgatgggagacggtaggaaggatctgccaggcacatccctggtccctacccctcagaagcttggagaagctgccagcccagaggcccagcgcccactcactctgagaactccccgcagatccaggcggcagcgtacagcacctcacagatcccgttccgctgggtgctgctggccagcaggtgtgcactgtcaagcagcgcagacatctgggacacggcgaacttgcggatggccttcacgcggatggccacgtccagcatttgggcggcgatgaggtggccgtgccgtgtgccctccagccgggtcagctccaccaggatgctgatgtacctgtggggcagaggcggtgagtgagcggcgccacggaacccccggccacacccctgggagcgggacgcaccactcgaagttggtgatgtactggtagttggactggctgcagatgtcaatgatcttggtgagcagctcgtcacggtaggtggtaccctctgccttgtctacgtgggtcatcagcttcttcacgatctccatcaggttcttcttggacacctgggcaaaagtgtacagacagtggtgagagcggacccagcctggggcctgcttggtgagacacccaacacctgctcctgagacagaatccacgggacacaggcggacccggattcacagatcgatgccagggaggcagcaggcccctgcgatgtgggctgggttagaggcacacgaccccagccagggagcaacaactggcccagcacagtctgttctgcaggctcggccccgccccctccacacaggccctggaagacaggcatggaccaggactggcgcccctctgccctgccccaccacactaactgatggccgagtgtgaggggactccatgcattccacgtggctctgcacctgacacttaatgtcccttagagaactaaggccaggcgggcgggcggcggacagagggcacgcaccatcccatagagcaggtccagggcccgcagccggatggactcgtccttgtcgtccaggcactgcaggatgaggtccttgtgggactgcacggacttggggtgggtcttcaggatcttggacattgccagcagccccaggtacttcactgcagagagaggccagagccgggtcactgggacggacacaggcagcagggtgcaggcagggcccacggctctccgggccgggtctccacctcgggaggctgcctggccttggcaacctgggggtggacagagcaagtatcccagctggagctcaccacgagggatgtcgccctagcagagccccctccctgggagccggggtgcaggctgcccccatgccggctccctcaggaaggcctcccctacctactaccacgttgtagtagctgctgtcagctctcctcttcccacccagccagtgcagggaagaacgcagagaagactttccagcagcagcagcagatacccttggcccaaggcagggtctcacctgtacccagtactcactgttcacccgactagcccaaaccagctcacggacagctaagggtggctgggcatgaggcacagatgccacaacctaagccagggccaccccagccacagggcacacagctgaacccattcacatactgccatccacggtggctttcaggccacggggcagcactgagcagagacagacaccgtgaggtccacggagaaaacgcagtagtccccacctacccgtgggggatgggcccatgaccccagtggaaggctgacacggcgggcggtactgagacccgcgtgtgggtgtttttctgacacgtctgtgcctatggcgaagttcagtgtgtacattaggcacaataagaaatgaacaactaatagtaactaagaacagaacaaccataaaacacggtcacgaaaggtatgtgatcgcggtctctcttgcaatacccgactgtggggtgcttgcctatttttggactgtgttgggggtacctgaaacctcagataaggagggccactccactatctgggctgttgcaggcgagtttgccaactcctgctctcaacaaaaagacctggcttcaaaatgagcatccaaaacaccgcccaggtacaaggtaccaggcaggggccgctaattctgattcctcaacagagcagcacgggggcacccacatgcaggcaggcacctgggcaagggtgctgtgtgctgctctatctcacaacgcaaagcctcacgcacccccgcaaaaacatgcagaggctgaaatatccagaaatttcggaccaaggtgctcagtgagtggcatctgtccaactgccaggatctccccagtgggggcctttgccatgccccctgcatctcccctgggactggggctcagaggagctggtgtttcccagccaccccacgcagataggtcggggtgcaagggcgccacagggcactggcagagggctgcctctgaggcagagtgccatccatcagggagacagctggggttgcagatgccgtgtccacttcctcctcacactaggaggacccctaacttcacagagctggggacacgaaaatgacagcactggggaggggatgactcacagttctgatcggagtcctcgatcaatatccttaatttctgaacacaaagctgaaaagaagaaaaaaacgatgctggttacatcctctaaaccaagggtgagtcccacaggtaccctccagattcaacctcaacctggcctaaggcccggcgtcagccccacccaccaatcaaagcccaggagggaaacaagcatggcccacatggggcactggagacaagggaggccctgcttcccacgggcgctctcccccactcctcagtgccccatgcatccaccccacagacacatgatggggatcccaagcaggctcgggtaggtagtgcacacaggacgcggctgtgccctcccaagccgcaagatggcgtggggggaccagcaccttggtcacagggtgggcaagctcccgcctgtggaaaggtgtggcctctgcagtgtgggaccccatgggccccgcccagtgcgggacgtacctggatgctggcgctgtggttgggcatgccggaggacagcgagatgagcactgcaacagacagcttggtcagcaccacggtcagcaccatggccagcgccgacaccaactcagggccacggggcaccagcaccccctcgccgggaggagggatgggagggaggacagaaatgccactgagtttgggaccacgcagcccaactgtgtttgcaaaaacctagctccatcacaggcctgaggataggaacctgcaggggcccccaccctcactgacaggatggctcggggcctcagctgttcctgcaaacactggttcactcgcaacccctgcttccctctggagtctggaatcccggcaggggccaggccccgaggccacaggaccagaccctgtaggaacccaggcgctgggtctctgggagcctccatggtgacacttcacaaattatcatcacagctcactgctgggggatgaagcacatccggcaggactccactgaaagaaggctctagaagctgggcctggcctccccaacatccccggagccattcccctttgctgactctgctgcgtcctttgggcagggacaggcaggcagcgagaagccgaccctcagagccccagctctaacagctttaaaagaaagacatgaagccaggggaccgccaggcacatgcagggacagagactcattttccaccaagccagtggcatggaatgaaggtgtacaggagaccgtgtgtgcgtgtgcgtgtgcatgtgttttctttttaagacatgggttcttggaagctaagctatgaggacgcaaaagcataacaatgatctaggccaggcgcggtggctcatgcctgtaatcccagcgctttgggaggctgaggcgggcagatgacctgaggtcaggagttcaagaccagcctgaccaacatggagaaactctgtctctactaaaaatacaaaaataagcgggagtggtggagcatgtctgtaaccccagctactctggaggctgaggcaggagaatcgcttgacctgggaggcagaggttgcggtgagccaagattgtgccattgaactccagcctgggcaacaagagagaaactccgcgatcccccccaccgccccaaaaaagaatgatctaatggactccagggacttgtgggaggtggggggtgagggataagagactgcacatggggtgcagtgtacactgcctgggtgttggtgcacataaatctcagaaatcaccgctaaagaactgatccctgtaaccaaataccaccaaatgccgcccaaaaactactgaaataataatttttttaatacaaaaaatacaaatatctggaaatgaataaccctggacagaaagtctacatataaatgtaaatacgaacgaagaaatgtggcaaaataaatgcatattcacgcatgcaagatttcagaaatgtcacacccaatctttgtaggagtgttgtttttttgttttgttttgtttcgttttttgagaagaagtttcgctcttgttgcccaggctggagtgcaacggcacaatcttggctcactgcaacctctgcctccctggttcaagcaattctcctgcttcagcctcccaagtagtcgggattacaggcgcccgacaccaagccctgctaatttttgtattttttaggtagagatggggtttca[143 bp omitted]tttcttaaaataggtgtatagattacccaggtaggaacaaatgtattttaaacagaaatgtaggccgggcgcggtgtgtagatgtgttaattatctgaattgtgctatttgacaatctagaggtgtaccttaaaaatataccatttttaattgtcaactatacctaagtaaagctagaaaaaaaaaaacaaaagagatggggtgctggctgagtacagtaactcaggcctgtaatcccatcactttgagaggtcaaggcaggaggatggcttgagcccaggagttcaagaacagcctgggcaacatagtgagaccttgtctctaccaaaaattcaaaaaattacctgggtggggtggcatgcgcctgtagaagcaagaggactgcttaagcccgggaggtcaaggctgcagtgagctatgatcgcaccactgcacaccagcctcaagagagacggggtctcactctgtctgcagcctggaactcccgggctcaagtgatgctcttgcctcggcctcctgaatagctgggccctcctactggtgagaagcttctgctttatcaaccataaggaagtccaccgcccaatgccccgtgaggctttggctgacttggagcagcttggcagagaccactggggacattggtcgttggcccttgtgccctggcccagccggaggtgtggat[133 bp omitted]aaccccgtgtctactaaaaatacaaaaattagccaggcgtggtggcgggcgcctatagtccctgctactcgggaggctgaggtaggagaatggcgtgaacctgggaggcggaggttgcagtaagccaagttgcgccactgccctccagcctgggcaacagagtgagactctgcctcaaaaaaaaaaaaaaaaaaagaaagaaaaagaaaatatttttgtggtagatgctgctatttaagtatccacgggtgaaacgatatgctgtctcaggagtgctttaaagtctcagaaaaaatgcagtgtactgtgagagcggatggcaggccctgagcagcaggggccggcatctgtggaagcaggtatgaggaggggctttatctgcaggtgaatctttcatacccaaggggactccagagtggctgggccaccaggcagcttaagaagcaaacacccagcaccaatggcggtggaagaccaggcagacgcatggccaccttgacagcagaggcctgggacggactcccagccagccccaggccccaccagccagctttccttctcagttccagcaggggtggcgctcggagacaccaggcctggcgccctcctgtccccacctgagaccccagcctggcagtgccagcccttccagatggggagagtgccagttctcacctgcaatcacggtgttcacacattcatagaggagagacatggcagacgtgctaaggaaaggaacacagggaagcggcatgaggactgggggcctcgtcagatgcagtgacccagtgccggcagctcagctggagacggcctccgccccacggctcagggagtgtgccccaggagggagcccgtgccttgctctccaaggcctgtggtgctcggctggtcatcgtctcatcttcccagaaagggcaggtgagcaatccctctgcaactgcaggcccgtgacagcatccacgcagggacggaccacgcacccccggcggcctgtgagatggcaataccgccttcctactgcatcttttctagagttttttttgttttgttttttgtcttttctgagacggagtctcgctctgttgcccaggccggagtgcaatggcgcggcctcggctcactgcgacctccgcctctcaggttcaagcggttctcctgcctcagcctcccgtgcagctgggattgcaagcgtgcaccaccacgcccggctaatttttgtattttttaggtagagacggggtttcaccatgttgcctagactggtcttgaactcctgacctcaagtgatctactcgccttggcctcccaaagcgctgggatcacaggcgtgagccacagctcccagcccttttcggtgtttcgatgtgttcagacacacagataatcaccatggagtcgcagctgcttacagctttacagtcacctgcagcgtagggccgcagccaggagaatggccacgcgccatagcctaggagtgtggcgagcttcagcagtgaagtccgtgtgcgcgtatgctacactgctcacatggtgaaatgtactaatgacacccttctgtgaatgtgtccttgttgccgacacatgactgcatctgaaagtcatggcgatgacgcctctgcctgcggcccactgcacccctccccttccctgcagtgggggccggggaggggtcctggctccgcctcagcacttggtctgaggaattaaagtgtccccttctagcaaccaaaggcagcctggcctgaaaaggctcctaacataggatcccattccacaaccttgcagtgcggagacccacaaagaaaacccaaactccccaaacgtctctaagcagcatggagaagagtctagtggccgggaatgccactacaggcttccagtctaggacggacagtcatctttcagctgcttcacgcccagcccccgctgtaccgcactggggccgggcttgcagccactccagcactgcaccccgtggagccggcccgcccccgccgctccgacactgcaccccgtggagccggcccgccccacagctccgacactgcaccccgtggagccggcccgccccacagctccgacactgcaccccgtggagccggcccgcccccgccgctccgacactgcaccccgtggagccggcccgcccccgccgctccgacactgcaccccgtggagccggcccgccccacagctccgacactgcaccccgtggagccggcccgcccccgccgctccgacactgcaccccgtggagccggcccgccccacagctccgacactgcaccccgtggagccggcccgcccccgccgctccgacactgcaccccgtggagccggcccgccccacagctccgacactgcaccccgtggagccggcccgcccccgccgctccgacactgcaccccgtggagccggcccgcccccgccgctccaacactgcaccccgtggagccggcccgcccccgccgctccgacactgcaccccgtggagccggcccgcccccgccgctccgacactgcaccccgtggagccggcccgcccccgccgctccgacactgcaccccgtggagccggcccgcccccaccgcgcatggcctgcactcacctgtggatgagattggtgaggggctcgatcagcttcttgcccagccgcggttccaaaggagtaagagcaccgaactgtggggacagcagggcctcggtcacccgcagggaatgccccacgcagggtgagggacagggggggcctcggtcacccgcagggaatgccccacacagggtgagggaatgccccacacagggtgaggaggccacattcccgggcagtacttgccagcttgatgatcttgatgaggacccagttgttggtggaggacgtcatcagcttgaaaaagagcggggccagggacaggtagttcttagggttgcgtctggccagctcgcagatgacattgacggcagccgactgaacccctggggaacaaggggttctcatcagcatgcctgtccttccacctagaaaaccatcctactgtcttcctggcccgcgaggaagttctggggcctgcagcagctcccactgaacatggccctggctctgccacctcctcctggtgacagggacagcagccacagacctgatcctccagggaacaggccacagcagccagctcctggcgctgagaaagcattgctcggcactgttgccaggaacaagtgcgcacaagcgtcaccaagctcaggacagcctgacagcggccctctgagtgggggtttcagcatgagggctccagaaacagctgcccagccatcggggctcagggagtcttcctgctgcatccatgcccaccactccagggagaagctcgcccatcgggtcccgggcttagggctggggtctcccctcctgcacacagggccttgggattcctgtgggctggctttggggtccaccgacccacgcctgccacacgccagaggcttcacacaccagcccagggaaactcagtgaaactgaatctgcagccgcgtcccgcagtcaccacaccacaaatacacaacagctacactaggtggaggcagctcctgcacgggacatatggtctagaccatcccctgccctgtggaaggtgcctcctggtggcactggtcctaagaggggctggcgggggtgggtacacctctgctcagggacacgccagactcaccgccagctgccacattggatcttactgcccccaccaccagcacctccctcctggctgccccagcaaggggaggcccagccacctccaacaggcatgttcctggactgagcccttcaccactccccgcagcaccccccaaaacacgccaccacctcttcccagggcaccggctgagcccccaccctcaaccctgaggcttaactcaaatccacaaaccggggtcggggtcctccagcttctccttcagccggggaaaggcagggcgcagcgactcggggtacttcaggaacaccttgtacatgatcagcacagccttcttcctgatgtagggcttggtgtgtgacatctgcggggcagcgggcttcagcctgcgcgggctttctgcgcctcatccctgctctcgcccctcccagccgcctcctccacagagaggagatgccctccagcccgacgctgtggctgcacaccagtcccaggggccacagaccagcatcttggatggcatggaagccagcctcactgtgcccctgactcaggcctgccctccagagagagccctcttcccttgtggccttcctgccccagggtcctgggtcccacagtgggaggaaggctggagaggaaagtcacacagggaacgagggtgtgctgggaacacagcctacagcccagctcctcacggctgtgccctgcgactgctcaaattccccagcgggagccctcccatctaacaggcccagggagtcgcctcgaactgcctggtcctgacagagccaatccatgatggggcactgacatccaccctctcgtgggctccccactgctttactctagaggagccggcactctgtgaaggccagcagtcagtgttttcagcttcatgggccagacagcctctgtcatgaccacacagctgtgccttcacaaccaaggccaccagagacaacacaacacgtgaaaagaaggtgcagccggctggatttggccctgtgccgcagcctgctgatccctgatctagaagcttagcaggctgtgctgacaatctccaagaccatcagccacgatctagacacctccaggtggacaggcagccacatggggacggcgcccatcggccacgatctagacaccaggtggacaggcagccacgtggggacagtgcccatcggccacgatctagacaccaggtggacaggcagccacgcggggacagcgcccatcggccacgatctagacaccgggtggacaggcagccacgaggggacagggcccatcggccacgatctagacacccggtggacaggcagccacgaggggacagggcccatcggccacgatctaggcacccggtggacaggcagccacgcggggacagcgcccatcggccacgatctagacaccaggtggacaggcagccacgcggggacagcgcccatcggccacgatctagacacctccaggcggacaggcagccacgcggggactgcgcccatcggccacgatctagacacctccgggcggacaggcagccacgcggggaccgcgcccatcggccacgatctagacacctccgggcggacaggcagccacacggggaccgcgcccatcggccacgatctagacacctccgggcggacaggcagccacgcggggacagcgcccatcggccacgatctagacacctccgggcggacaggcagccatgtgaggacagtgcttcccagggaggaaagcatgcccgctccacactgttaatctggctactgtgttttaaatgaaaaggaacaaaggtcccctcatgagctggaggttaagtcaggcacaaaacagatgtttctggggccaaaatttccaggggcttcccaggttttagactgtcacagccgggggcgtagcctttgacaagcagagtggcaaggaggagtcaagctgtggccagggatggaggaaagaggaccacacagaagcccactggcagctcagacaggagccactgtcagacctcagggcaaacatcccccaccgtgcctggcctgtcagggacaccctgttgctcctctcggcaagatgatttcaaatatcaacttaagacacgcaggaaccaaagcggcccaagagccgctccaccagctgacagtgatttggttcccatttcaggcaggccacgcaccggggaccccggccggtttccgcatagccaagcttcccaggcatgccactttgaccgagtttttcccagagcagacatgcaggggtggtgggcaggcttacaaactcaccagtgtcatgatgtcatttgccaggtctctggcaaggtctggggtgacgaagcaggacagacccgtcagtgcaacacctgtgtcgtactggctggggctgctcaagtcctggaaagtgagagaaaggggccgtggccaggatgccctgggtggcacatccgacgcctgggtcaccaggagcagcaggagcgaaattctcccaggatgccccaggactcggcatatcctcttggggtgcagctgtgccttagcacccctgctgctgaggggtctgaagctgaactcggacaaggaggaagaatttacagcccatgggagactctgtcaccaagagaggagccgggatgggcgcggctgggaacagtgaggtctgaggcacaggctgaaacgctctgtgggtgggaatcaaccaagtttcttggctcctcctggatgggcagggctggggacagagaggtctgaggcacaggctgaagcactctgcgtgggaatcaaccgagtttcctggcacctcctgggacagaggcgcctgtcacaagtcactccaagtgtggggaagggccaccccgggtgcaagagcagagcgttccaggcctaaaaccagggcttccctcacgtatcactggcagctcccagcttgcagagacggcggtgctgggcctggcacagaatgggcaggaaagccccacaggatggggtcctcagagaccctgctcccatttggggtccctttccgcaacaactgaggggaagggcccaggaacagctcccatgggtccctctcaaagttcagctggcagctgcccacgccctcccatgaactctgccccagctcttcactcccgcagctctcactaaaacacggaatctgccccagctcctgtgtcagcacttggggaaataaatcctctcttgatatcacaaacctgctcttggggagagatcttcttaaggaaactcccgagacttcatctatatatgcatctaccaagatccgttttcagggttaatattctgtggtcaaaatatgacaaggccagcttttttttttttgagacgagtctcactctgtcccccaggctggaatgcagtggtgcgatctcagctcactgcaacctccacctcccaagttcaagcaattctctgcctcagcctcccaagtagctgggattacaggtgcgtgtcaccacgcctggctaatttttgtatttttagtacagatggggttttacc[264 bp omitted]cacggtggtgcacacttgtagttccagctacttgagaggctgaggcaggagaattgcttgaacccaggaggcagaggttgcagtgagccgacattgtactccagatggcgacagagtgagactctgtctcaaaaaataaataaaataaaataaaataacacagtgagctgaagtggtggcacacacttctaatcctaccactttggaaggccgaagcaggaggatcacttgagcccaggggtttgagaccagcctaggcaacgcagtgaaaccctccctgcctctacaaaaaatacaaaaaaaatcagccaggtgtggtggtgtatgcctgcagtcccagctactcaggaggctaaggtggggagatcgcttgagcctaggaggtcgaggctgcagtgagctgcaattgcgctactgctctccagcctgggtgacagagcaaaaccctgtctcaaaaaaaaaaaagtaagaaaataattttttttagggctgggcgtggtggctcacgcctttaattccagcactttgggaggccgaggcaggcagatcatgaggtcaggagttcaagactagcctgaccaacatggtgaaatcctgtctgtactaaaaataccctaaaaaaaaaaaagaaagaaaataattttttttttttgagacggagtctcgctctgtcacccaggctggagtgcaatggcacaatcttggctcaccacaacctccgcctcctgggttcaaacaattctcctgcctcagcctcctgagtagctgggattataggcacgcaccaccacgcccggctaattttgtatttttagtacagacggggtttcaccatgttggtcaggctagtctcaaactcccaacctcagaagatccacccgcctcagcttcccaaaatgctgggattacaggcatgagccaccgcacccggcccaggaaataattttttttattaaaaaacaagccaggcgcagtaatcccagcacttggtgaggctgaggtgggcagatcacctgaggtcaggagttccagaccagcctggccaacatggtgaaaccctgtctctattaaaaacacaaaaaaattagccgggtgtggtggcacatgcgtgtactcccagctacttgggaggctgacgcaggagaattgcttgaacctgggaggcagaggttgcagtgagccaagatcacgccattgcactccagcctggacgacagagcaagactccatctcaaaaacaaaataaaacaaaacaaaacaaaaaaataaaataaaaaacaaaatgaggccaggcacagtggctcatgcctgtaatcccagcactttgggaagccaaggcgggcagatcacttgaggctgggagttcaagaccagcctggccaacatggtgaaaccccatctctactaaaaatacaaaaattagccaggcatggtggcgggcacctgtaattccagctactcgggaggctgaggcagtagaatcgcttgaacccaggaggcagaggttgcggtgagccgacatcacgccactgctctccagcctgggcaatagagtgagactcagtctcaaaacaaaacaaaacaaaacaaacaaatgacacactggactgcaaacatcggaagcacgtgatcctacacagaggaagcaggtgctaactggctgagccagggcccacctgcgtccgaggccaggccaggggcaggcaccaggtcagagccgcgcccgacacacagggtctaacagccctgagcacctcgcaaggcagcggcggatctaagtccccagtgaggtgctcacacagggaccggccgtgccgagcccatcagcaagagacacaaagctgggcacgacacgtggccctccttgctgggcagctgccacctgggtacctagggcggctggagccctccaccctcctccctcccagttaccacctgcaaaacccgcccccatcctcctcttagcgggccagactcccgcccaggccccacctgctacacggccacgacccaaggagactcccgcccaggcccctcccgctacacggccacgacccaagaagactcccgcccaggcccctcccgctacacggccacgacccaagaagactcccgcccaggtccctcctgctacatggccatgacccaagagccccacggcatctagggcgcatgtcgcccgcggcccaggcgggacgcccagctctataaccttgcccacaacggtgagcccagcagagccaacagtcccaggacctgcaccacaccctgtgccggacatcagtcacagccagtgcccccacacctgtccctcggcgtgctgggagcccccagcccaggacttcaggtcacactgtggggtcgacaacacagccacagggtcccgcccttgcacatggacattggagagccgggaccgtggcctctgacgtgcggtctggggccagaaaggggccagctgcccatgaaaagggtgggcctgattctccaacaccccaacccctctattgagaggcgggaaccaaaggtgttcagagctcggggccaataaggacctttactactacccagtggcctccgtgaccatttcaaaatgcaacatttacatggtgctgaaaaatgcacctcgtgggactcaaaaaaagccgcgggcaggaagcaccccacatgggcagggaagggcccacagctacaccaggcactaccatgaggggagaagggaagaaagtgggtgaccgcagaggccagctgcgagtggaccctggagccccattcgccggcccctccaggtggtgagcgagggaagggggcaccgcaccactcagcatccctccacctcacaagcccaccagggagcgcaggctcagacccgccgggcctcctctctgcgtctgctgggaggactgtggctccggaagccccgctcgcactcaagggggccacaggcacctgctgcccacaggaagacgcgtgtgggaaccagacgctccggcaagggcagactgcactcagcacagagcggccccggcccgggaacacccaccttacggatctgattggtggtcagcatgatgacgtcggtgccttcgtgaaagctctgggaagcagcgaggtagccaattcgctgggagagaacagatgagcacatcagaggcaggacacccgcagcctccaggagctccagctctgctctgcagcgaccacaccaggcagcgccagcccagaagcaacaccctgcagcctggacgctggggccaccagcaagtgggaaccaacccgcatttgaaaaccaacgcagatttcttcaaaattccatgaggaaattcccagtttggaatatgtatgtgtttttttttttttcttggagacaaagtctcgctctgttgcccaggctggagtgcaatggcacgatctcagctcactgcaacttccacctcccgggttcaagcaattctcctgtctgagcctcccaagtagctaggattatagccgcgtgcgccaccacgccccactaaattttgtatttttagtagagatggggtttcaccatgttggccagcctggtctccaactcccaacctcaggtgatccgcctgtctcagcctcccaaagtgctgggattacaggccactgaatccaccttgggtaacagagctagactctgtctcaagaataataataataaaaattggccagtcacggtgcctcacacctgtaatcactccccaccccaccagccttgccgtcccagaacctcaccttgaaggtgaacttggaggcactcatcacttctatgatgttgaaggcggcccagctgatgtcgtatcccaacatctgtaactgttaagggacgcacaggaaattgcactcacaagccaaagcagagagaaaggttttgagccgcggcatcaagcgctccctcccagcacacggtgctggaacagactcattcactgtcagcaaaccacccaatacgtacccctggggcctttaatttcttcttttgacaaacgactctgacatttaaaagctacagggacaagttagtaacaggcactaaaaagagactcaatgtctgcaattggttaactggcgcttacgggtactggctacattcccctaccaacccttggcgaatcggctccttgaaatagttacgagacgagcagcagcatgggggaccctggacgagccctttgtctcgtcctcccacggggaaacgggccagagggaggagtgcctgtccccagctcacgcactgacctggaactgcagccaggaaaggagccagccctggaaggtccagggccctagctctccccactaggtgtcctggcccagcctgtggtgggagggagccgagactgcaggcgaggggcgtccccagtgaatcccacccagaagaggaccccatggggctccctcagggctaccaccagggcctgtgggttgccaccctctggcctgtttgccagccatgtgaccaacatggctttctgctccaggactctgggttggccctgagtggctcaccgacagcaggtggtaccaatgactgacaggtggacagacaggctgatgaataggggacacgtgctgagtggagaagcagcccgacagtgctgggcgctggccactgggaggcacttacatacgtcagcttgcagaccgcgttcgccttcaccgctatgttgtcctgcttcagctcctgcttgatctcatcaatgcactgagatatgtattttgcctataatgggggataaacacagagat[142 bp omitted]aaccccgcctctactaaaaatacaaaaattagctgggcgtggtggcgggcgcctgtaatcccagctactcaggaggctaaggcaggagaatcgtttaaacctgggaggcagaggttgcactgagccaagatgacaccactgcattccagcccaggtgagagagccagactccgtctcaaaaaaaaaaaaaaaaaaaaaaaaaaaggaaagaagccaggcataagagagagcacaccgtgtaatccatttctatgaaatgtccagatcaggccaatccagagacaggaaggggattcgtgggtgccacaggctgggagaggagacgggagggttcgctttctttctaggctgataatgttctggaacttggccgtggtggtggcgcacagcattccgctatacacgccccaccgtttgccaactccttggtggacgaacatgtggggccttcccaccttcagccagggtgactctcactgctgtgaaaaccacactcaggttttgaggggatgtgtctggtgtgtctggatccccctgggcctgctcactaactgcgcgtgtctccagaacaccatcaaggacaattctgacccaagcgaactcaggcacgaggtccagaatggcagacaaggttcccaagggacaggcagacgtgaggcgcccaacatagcaccagagacaagccgagtcgatgccatgctggccccagagacaacccaccccacctggaaggagaggagggagcagcagaggcttggagtgcctccatcagtgaacgatgaggcacccacaagccctcctaatgcacaggagcccctctccatcatccgacaggtcaggagtgacggctgcccgggccccgtcctgccagcccctacgtcgggatgcaatgttcctcctgctgtgcccaccagaggcaaggatggcaagcccaccccatcacgcttctgtcctcagccccactgtagctggcctcgaagcagccccaggagtacccaccactcatgtgtcacccaggaccacaccccaacctcggctgccagctgcaccgggctggggaaggagacacagctgtgggggagtgggggggtgggggagggcacagacacataatattttcctccatgctttatgatccaactttgtacaatggaaagagtgccacccgatcctccagacgggcttcaaattactacacctcaccccaggactgtgctcccatccccggagcaaggataacccactcctcctgctcaaagggtcaggactgttgatttaaaaggaaaagaacaaaaagaccatcccaggcgtggagaggtcagaccctcacgagggcaaaggggatgtcaaacggcgcggctgctgtggaaagcagcctggggttcctccacggttccatgtggagttaccgccccagcaattccacttctgggcgtgcacccgaggggatggaaaacaggtgtccaaacaaaaacaagcacacgaacacacagggcagcaccatttctagtggcctgaaacaggaacagcccccacgctcgccgctgatgaatggatacacaccatgtggtgggtctgctccagtcaacttgcttgactttttttttttttgagacagggtctcactctgtcgcccaggctggagtgcagtggtgagatcactgctcactgcagcctccacaccccagactcaagtgatcctccccgctagcctcccaaagcactgggaccacaggtgtgcgccaccacgcccagccactagtcagctttctaggaactcggcagtgggtcacaaccctgggactccctcttggcttttaacttctgataaagtccaagtagctcctctcagaccaagcctcacacaaacgtcttttttttttttttttttttttgagacggagtctcgctctgatgccaggctggagtgcagtggcacaatctcggctcactgcaaccttcacctcccaggttcaagtgattctcctggctcagcctcctgagtagctaggattacaggggcacaccaccatgcccagctaattcttgtatttttggtagagacggggtttcgccacgttggccaggctggtctcgaattcctgacctcaggtgatctgctcgcctcagcctcccaaagtgccaggataacaggcatgagccactgcgcccggcctgaattagaaaaaaaatgtattagttggggtagggagacatgacctagacccaaaagattatattataaacatagatgtaaattagctgaagctataatgtggctatacatcattgacactttctacaaaaacaccgggaaatcagaggagcaacatggtgaaatttctcaaacacctcagctagttccacactaaattcacacttcaccacacagcaagtgagatactaaaacaatgatgctggtctcagcatctatttaattctgggatgtaatttagaacacagggtgcgtatttcctttatacactaagtcctcaggactgcagtaagacaggccatttaaaccctagatacacaggaaaactccctggggtacttttttttttttttttttaatggagtcttgctctgtcaccaggctggagtgcagtggtacgatctcggctcactgcaacctccgcctctcggttcaagtgattcaagtgattctcctgcctcagcctcccgagtggctacgattacaggtacacaccaccacgcccagctaatttttgcatttttagcagagacaggatttcaccattttg[132 bp omitted]cacaggctaaagtgcagtggcctaaccatggctaactgcagcctcaacctcccaggctcaagagattctcccacctcagtatttgggagtacagtaaatagctgggattacagggccatgccaccatattgggcgaatttttaaaattatatatatttatatatatttatttttgcatatatttatgtatatacttgtttacatatatatacatttatttacatatatgtttatttatatatatatatgtatcttttgagacagagttttgctcgtcgcccatgctggagtgcagtggtgtgatctcggctcactgtaacctccgcctcccgggttcaagcaattctcctgcctcagccttcccagtagctggggttacaagcaggtactaccacgcctggctaatttctatatttttagagggggtttagccatgttggccaggctggtcttgaactcctgacctcaagtaattcgccagcctcagcctcccaaagtgctgggatttacaggtgtgagctactgcacccgacctaacattttttacttttgtagagttggggtctcactatgttgcccaggctggtcttgaactcctggcctcaagtgatcctcccaccttggcctcccacagtgctgggattaaaggtgtgagccaccgcacctggctggcgctttttctagttttaaacttccgattctcagtccttcgcctccaatgaattaagtcagcatcttgagaccagggaggccacatggtcacaacctcagcagctgattctcaggtgctgtccagttcaaagaccaacgagctgagcccttggcacatcccacggtgctttccacgtggccgcctggctgaggggagccgggccgctgagccgcatgcaggctgagggcctgggagctcacccagctcatgagagcaaagcccggtccccctcaccccaatgggggctctgaggggttttttctgttttttttttttctttttttatttgagacagagtttcactcttgttgcccaggctggagtacaatggtgtgatcttggctcaccacaacctccgcctcccaagctcaagtgtgattctcctgtctcagcctcccaagtagctgggattacaggcacgagccaccacgccaagctaattttatatttttagtagagacagggtttctccatgttggccaggctgatctcgaactcccgacctcaggtgatctgcccacctcggcctcccaaagtgcggggattacaggagtgagccaccacgcccagcctctttttcttttttttctgagatggagtctcactctatcgtccaagttggagtgcagtggtatgatctctgctcactgcaaactccacctcccaggttgaagtgattctcctgcctcagc[136 bp omitted]aagctccacctcctgggttcatgccattctcctgcctcagcctcccaagtagctgggactacaggcgcccgcgaccatgcctggctaattttttgtatttttagtagagacgggatttcgccgtgttag[132 bp omitted]tttgaagccctgtttcaaaaaaatcaaaaaataaaaaattagctgggcgtggtggcacatcgtgtagtcacagctacttgcaaggttgaggtaagaggattgattaagcccaggaagtcaatgctgtagggggccgcgatcgcaccactgcactccagcctgggcaacagag[161 bp omitted]cccatctccgctaaaaatacaaaattagccggggtggtggctcgcacctgtaatcccagctactcgggaggctgaggcaagagaatcgcttgcacccgggaggcagacgttgcggtgagccgagatcgcgccattgcacttcagcctgggcaacaagagtgaaactccgtctcaaaaaaaaaaaaaaagaattccaagtcccaacagtaactgagtcaggaaaggggacgcgccggcgaagtggtccatcctgcccaggataagttactatccacaatcaccatcacttcgaattcaaacagaaaagccaccaaaccccagaaccccagaagcagcatgaaaggagcttctcctgcggagcgctctgctctttcaacagcccgggacaccgtcctgctttattctcttgttgtggacaggctcaacgccctctgcacccaggagcagagcggccgcggccaccctgaggcagcatggaaccgaggcccccacaccgggacctacctccactcccacaactgaggctggtgcagcacactaacacgcaacagggcagaaaccagaaacagccccatccaggaccagaccccggccagccctgcctagtccagccccagcccgtctctgtgctcagtcctgtaacttgcggcccctcagctcagcctggatgtctgtggggtggcacggtcaccattaaaaccctctgagtcaaggcggggcacaatggctcacacctgtaatcccagcactttgggaggccgagcagatcacttgaggtcaggggtttgagaccagcttggtcaacatggtgaaacaccgtctccactaaaaatacaaaaattagcttggtatggtggtgcatgcctgtaatcccagctactcaggaggctgaggcaggagaattgcttgaacctgggaggaagaggctgcagtgagccaagatcgcaccactgcactccagcctgggcgacagagggagactatgtctccaaaaacaaacaaacaaacaaacaaaacaaaaacgcttctggctcaaatccacagagacagcaggtcagtggtcgccagggcataggtttctctgttctgaacgtattgtgctgaatcactgcacgtttgtaaatatactgaaatctacttcatttcatgcctagaacaggcagattttgtggcatgtaaattatatctcaactgttcaaagaaaggaaccaccttggctcagcagcatcacaggacaggacaaaacaccaggaaggacgtgaggctccatctggaccgcagctccctgagggctggaggcctgggcagagcagaggagggtcctcaggccccagtcacagatgagcaggagcattagggaccactcagcacagagtgggccacatggtggatgcccagcaggccacccggggtccccacatccctccgcctgtctcactgccacgtggacaaatcagccaccagccagtccaagaactcctaaggcagtggttcccagcaggtgactctgcccctccaggggacactgggcgatgtatgcagcatctgtggttgccacgacttgcagatatctaggcatggagtgggtggaggccgggtacgctgctcagtgccctgcagtgccccaacacccccaccccaagaacaatccagcctgatgtccacagtgccacggctgggccagagcacacccagggctggcgtcgccgctcctgccctctggtcttcctggctctccaaagctcaacgcaagtgagcatcacccagaagctggttacaagggcagaactcacccccacccacatgcccctccaggacccacatgcctcggccttgaagccacctccacacacacacaccaagccttctgcccagagattgccttttgaaaacccctgcaaaggagtaaaatagacaaagaggcccaagcctctttgaagagagagcttcaggaagaacgcaagcggctaaacgcctgtgaatgagtgaaccgcactcataagcagggcagctgacactacagctgcaccccccaaacaccccagccctgctggtggtgcgggaggcgaggctgcggctttcatgcttgctgctgggagaagctctgtggggagcgggcgctttcctgagggcctctacggcttgagtccattcataaaacgaccccacatggaaaccacccacatgtccgactatgtatggaagctgtgtgtaaacaacagagcacagccacccacgtcaaggaccgaggacagctccctccccaccatgacggctgcaaagcacacacaccttaggcaatcacgcctatggttcagggacacaaatttaagtgataaaactacaagcaagtcaaggaaattaaacttacagaagtcaggatcattaccataataattagctgtacaggccgggcacactggctcacgcctgccatcccagcactttgggaggccaaggtgggtgggttacttgaggtcaggagtttgagaccagcctggccgatacagtgaaaccccgtctctgctaaaaatacaaaaattagccaggtgtgatggcggccacctgtaatcccagctacttcggaggctgaggcaggagaatcacttgaacccaggaggcagaggttgcagtgagccaagattgtgccgctgcattccagcctgggtgacagacggagcaagaccctgtctcaaaaaaaaaaaaaaaaaaaagccgtacaatgtcctatgcactgcatattttgcaatcaaagcagctcagagggaaaacaaagcacatttagaatccacgccctctggtccaccaccaccgtgacagcacgggggacgagggcacctggacaacagggacgcattcgggaattctgggagacttttcttaccatcaaggggggtcaggggcttttaatttggggttgattctacctccaagagacattctggtctgggcacacctgtggctggcatgaccagaggagcccctggcacggagtgggtgggggcggggatgctgctcagcaccctgtagtgcccagaatagctctacccagagaatgatccagccccaacatccacagtggtgaggggcagacgctgatctagtggaatgactgacgttattaaaaggagagaaaacccgctcagttcggctgggcgtggtggctcacgcctgtcatcccagctctttgggaggccgaggc[131 bp omitted]aggcaggagaattgcttgaacctgggaggcggaggttgcggtgagccgagatcgcgccattgcactccagcctgggcaacaagagcaaaactctgtctcaaaaaaaaaaaaaaaaaaagaaaagaaaacacactcagttcaaatttaatctctttatatcttttcctttcttttttttttttttttagttggagtccgctggggaggctgaggcagggagaactgcttgaacccaggaggcggaacttgcagtgagccaagattgtgccactgcactccagcctgggcaacacagcgagactctgacttggaaaaaaaacaagaagaagaaaaaaaaaacaaaaaagaaaaaagaaaaagaatatatgggctgggcacagtggctcaccctgtaatcccagcactttgggaggcaaaggtgggcagatcacgaggtcaagagattgagaccatactggccaacatggggaaaccccatctctactaaaaatacaaaaattagctggatgtggtggcactcgcctgttgtcccagctgcttgggaggttgagtcacttgaacctgggaggtggaggttgcagtgagccgagatcgtgccactgcactccagcctggcgacagagcgagacttagtctcaaaaaaaaaaagaaaaaaaggctgggcaccgtggctcacacctgtaatccagcactttgggaggccgaggcgggaggatcacgaggacaggagattgagaccacggtgaaagcccatctctactaaaaatacaaaaaattagacgggcgtggtggcgggaggctgaggcaggagaatggcgtgaacccgggaggcacagcttgcagtgagcccagatcgcaccactgcactgcagcctgggggacagagcaagactccgtctcaaaaaaaaaaaaaaaaagaaaaagaaaaaatggagaaaactttcccaaaactatgaaaaggacttgtgagaacaaaatattaaaagtcgtttgttttttgtgccaattctatcgagctttagaagctgaggacactcccaagtggaccaagacacatacacatgagaccactacttctcacgctttttggactcatcttaataggttttgcatgggaacccgatacgtttacacgtacacacaagtatcacatgcagaaatcaaagtttcaggacaggacggttactgtatgtgcctgcactctggtctcttctagtttcttttcctttttcttacctagcataaccattaaattgaattcacaacccacaaagaggtcacagcctgaggactggaaaacagtgaactagacaacctcagcgctctggcgcttccagaaaaccgcgtgtcactgcagcatcctccgcatcatccagcaaggagggaggtgactgtcatccccatttacaagggaggagacagagcagggggctctagatgggccgccccatgaagtcagccagtcagcccaagcacctggactcggatctcccaaacctcatgcgatttctactccatcgcactgcctttccacgtggctttcaaagtcattgctaagccttgtttccatgatgccacactcaagttttaggtgaaaatctattacgaaatggaaactttttttggaaactatactgctgcagaaaatgcgcacactgtctagagtctttgttccgggtgcagtgggcgggagggaagaacctacaacatacggtctataggatagctgctttttcaaagtgagtgggggtgctggaggtacaactagaactgtcattgaacagtcatttgctgctctccaatcaggagactccagcagctgcagagaacatccagaatcagacatgaacacctgagttaccaccctctggaccataacaatcgtcttccagtgagaaagccagggtccccagacactgcgtgtcctgcctgaaatcacccacccgccaatggcagggccaatgaggaagcctgggactttcaaggacaaccctgcgccgttttaaaaatgtttcccagccgggtgcagtggctcacgcctgtaattctaacactctgggaggctaaggcgggtggatcactgaggtcaggagtttgagaccagcccgaccaacatggtgaaaccctgtctctactaaaaatacaaaattagctgggtgtggtggtgcatgcctgtaatcccagctactcaggagctggggcaggagaatcgcttgaacctgggaggtgaaggttgtggtgagccaagatcatgcctctgcactccggcctgggcaacaagagtgaaactccgtctcaaaaaaaaaaaaaaaaagtttccaccaccaagacccccttgaaggggcccagacttgtggggaaggcgctatcaactcacaccaattccaaaggaagaaaaccaggctcaggggcttcccagtgaagacaggcacatccccctgaaaaccatgccccagactagaggtgtggtcctccactggacagaccccctggcccatcgtcagggtcccagaacaggctgctcagtgacatgcgctgaagggagcagggacgggcgctgggagatcctgcctgtgcagaaaaagtcctctcgggaagtgaaccacatttccaatctgaaccaagctcagtaaaaaccaggcccatcagcgatgctttcaactcacaaagaatctgaacattactccagttagttacacgttgtaaccaaagcagttagggagagcttctgagatgaagaaaaccaaggaggccgaagggaagtggggtggagaagaacaaaaatgacctcattaaggtgggggcaggcgaagccacaccacttccaggaaagtgtaaaggtgtaacaatacggcaagagctcgggttcccagagagagggacatgggctgagggacatggtgccaggaagcaagtcccttaacttccctgccctcctgggcacctcgtcctggacacagcctctggtactgggactggtgcggtatcagacggcggctctctttcaggcctgccttgctgtccacgcagggaagcaggcaggcagtcgctcaagtaggacactttctaaggctcccactgcccaagggctgcacgggtatccttaatgaagccagacacgtggtggccactctgcccattcttcttcaatctaggtcacaggttgggggaagggaggagcgggaaggaaacgatccccacggttgtaattttacttctggaaaactatttcctcgccctggctttcaggttcctacttgaagtcagcttccccattccagcttcccgcaagctgctacctcactggggatcaggatgccgctgtccttcctccctcctggcagcagccccaccttcctgggaacgggggcactggaggcaacgccccaagaccctgcctggttccgagccaggcctcagggagcgacctggacacgcatttacacgacccagaaggaagaaggagtttctccagggacggcccaggaccccctgcctcggtctcccggggagggtccgggggcggggcccgggcccctgcatttttaatcggtgattcggaaacacactcaggttgaagaagctctgcccagagacctcgcaagtctcctgggagggtggcccgagacgggggcaggtgggcccgaatctccctctgagagagtaaactgagggtccagggggagggcacctataggcggggcccagggcattgcattttgaacagcgcttcccccaggtgatccgatgaggcgaggatccgagatgtgctgctccaaggccttcgcccctcgtggggaaactgatgctgggggaccgaggaggtgggcggcgccccaggcccaggccaggcagggccggagccctaagcgggacctccaactaagacagagcccgggcgggcggcaggccgagcaggcccagtgagcagggctgggccctgggccggggctgtgaccaggccgagcagccccttggcgcgccgggctcacctcgtcctccttgtggttacggatgccgcggaccaagtcctgcagattcttgtcgaacatgcggtcgatgctgcccttcaccatcttgagggccatcgcggcggcccacgggcttttgcctcgggaggcccgcggctgggcgccgtgagggggcccggggcccgtgcctgccgcccgcggagcgccgcgctgccggccgctgcggcggggcaagctcccaggccagggcggcggcggggtccaaggaccgcggcagaggcggcgacccgctcggcaggtgccgcgatcccgctccgggccccttgcaaatggcggacaagatggcggcgggtcagctgacgacgagcgcccggtcccagccgagccggccccggaagccccgcctcccagaaagccccgccccgccacctccccggcagggagacgctgcgtttccctgacgacgacaggtagtccaatggaaatgtggcacctctttctcctgcgcgcggccccgccttttccggccccaaaacttgcgctctcattggtcagtggcctccggaactccgccttcttcctagttctgagccctagccacgccccttagaggctggtcctgaccctcccaccagctgacaggtgtgagcgtggctggatgtgggcggggcgcccacgtggagcttagccggcaagttcccgaggaagactggagctccgcctttcctgaatgtaatagctgacgcggcctgagagcctccaaacccaactcctgggtgggtgggggaacggatcctgtggttcccgcagcctcacaacatcctgtgaaatgggcaagacagacattaacatgcccacaggaagaaaatgaggccagagacaggactacgacattgtcattcattcagtaaacatttgtcgaaggcccattgtgtgccaggcatggtaaggggtgctgggcatgcagcggtaaatgagatatactgagtccctgccttccga[131 bp omitted]aggccaacatggtgaaaccctgtctctactaaaaatacaaaaactagctgggtgtgatggtgggcacctgtaatcccagctattcgggagggtgagtcaggagaatcccttgaaaccagaaggcagaggttgcagtgagccgagatggcgccactgcactccagcctggcaacagagcaagactccgtctaaaaaaaaaagagagggagaaagaaa[132 bp omitted]aaccccatctctactaaaaatacaaaaattagccgggcgtggtggcatgcacctgtaatcccagctacttgggaggctgaggcagaagaatctcttgaacccaggaggcagaggttgcagtgagccgagatcgcgccactgcactgtactctgggcaacagagcgagactcttgtctcaaaaaaacaaaacaaaccaaaaaaactggggtaagatatttacaatacatatatctgacaaatgacttatatcctggtggggcaggatggctgacacctgtaaaatcccagagtttaggaagaattgcttgagcccaggagataaaggacagctagagcaatatagtcagacacccatcttaaaaaaaaaaaaaaaaaaaggcagggggaggggaggatgggcgcagtggttcaaaccagtaattccagcacttcgggaggcctaaagggacagatcacatgaggtcaggagttcgagaccagcctggccaacatgatgaaagcccatctctactaaaaattaaaaaattagccagacgtggtggagggcacctgtaattccagccacttgggagactgaggcaggagaatgacatgagtccaggaggcagaggttgcagtgagctgagattgcgccactgcactctaggctgggcaaaagagcgaaacatggtctcaaaaaagaagtggggggggggaccgggcacagcggttcacgcctataaccccagcacttcgggaggccgaggaggacagatcacttgaggtcaggagtttgagaccagcgtggccaacatggtgaaattccacctctactaaaaatacaaaaattagtcaggcatggttgtgggcacctgtaatcccagctattggggaggctgaggcaggagaatggctccgcccagggggcggaggttgcagtgagctgagattgccccattacactcaagcctgggagacagagcaagattccgtctcaaaaaaaaaaaaaaaaggaggggaactgctgggcatggtggctccatatctttggaggatgtattcatgcatttctatcgggaacagtagaggaatcgctgggtaatagaatatgtgtgcgttagcattgcaagctagtgctaaacagtttccgggcgtccttgtgatttctttcccctcgcccgagatagagtcttgctctgtagcccaggctggaatgca[139 bp omitted]ctcctgggttcaagcaattctcctgcctcagcctcccgagtagctgggattacagctgcccaccaccacctccagctaatttttgtatttttagtagagactgggtttcaccatgttggccaggctggcctcaaactactgacctcaggtgatccgccttccttggcctccccaaagtgctggaattacaggtgtgagccactgcaccagcctcagaaatatttatttatttatttatggttttttttttctttttttttttttgagacagtctcattctgtcaccagggctggagtgcagtggctcaatcttggctcactgcaacctccacctccctagttcaagcgattctcctgcctcagcttcctgaatagctgggactacaggcgctcgccaccacgcccagctaatttttgtattttagtagagacagggtttcaccatgttggccaggatggtctcgatctcttgacctcgtgatctgcctgcttcagcctcccaaagtgctgggaatacagtcgtgagccaccacgccccatcctatttataggttctttagtcctcaggcgaagccctagggaaacagaatttctctctccactttctgtcccttttcactgcccaaggcaggactctaatctgattgggagcccaaacacctcattccagagaaggtcatgccccataccctggaggaagaaaagctacagagagaccaagacaaatctggacagacaggccctgcctggctccccagtcagtctattcatatgagatcatactaatttttggcccaattacgtttctttatgattgtgagtcatgtctgtttaatgaagctgccattaaaacccaaaaggaggccaggcggggcggccagtgcctgcattcccagcacttccggaggctgaggtgggtggatcacctgaggtcaggagttggagaccatcctggcgaacatggtgaaaccctgactctattaaaagtacaaaaattagccgggcgtggtggcgagcacctgtaatcccagctacttccggaggctgaggcaggagaattgcttgaacccaggaggtggaggttgcagtgagccgagatcgcgccattgcactccagcctgggtgacaagagcaaaactctctcaaataaatgaaaataaaaataaaaaaacaaaattagccaggcgtggttgccatacctgtagtcccatctactcagggaggctgagg[131 bp omitted]tgtgtcacacacctgtaatcccagctactcagaaggctgaggcaggagaatcacttgtatccaggaggt[141 bp omitted]attttccaacacactgtgttttctacctagcattttgtttattattggtctccacctcctcctcccacctgaacacaaattctatgatattgggactttgtccttttgttttctgtatgggtggacatttaaaaaatgtttaacttgatgaaaaaggaagaatgggccgggcgcggtggctcacggctgacatgccagcactctgggaggccgaggtgggcggatcaggaggtcaggagattgagaccatcctggctaacacggtgaaacaccatctctactaaaaatacaaaaaaattagcccggcttggtggcgggcgcctgtagtcccagctactcgggaggctgaggcaggagaatggcgtgtacccgggaggcggagcttgcagtgagccacgattgcgccactgcactccagcctggacgacagagcgagactccgtctcaaaaaaaaaaaaaaagaaaaaagaaaaaggaagaatggttttgacaagagtgctgattcttccatcactgggagttggtgggctggctgcaacctccagggtgaccagcagagagcagtgctagccaggctcaaagtaggggcagcttctctctggaaagatcctggcctggagccctgagctctggcaggagatggggacatttgtcatcagtcctagctccagcccgaatcagttaccttgtccccaaattatccatcctttcatccatccttccacctccccatccacccagccacatatcaaatcatccattcatacatacatacatctacccacccatcatccatccatccaccaatccactcatgcatccattcacccactcttccatctatccatccacctacctatccattcacccatccaccgatccactcacccactaacccatccatccacccacccacccatccatccacccaccaatcaacaacgtttattgaaaaaaaacagggcagggcgcggtggctcacgcctgtaatcccagccctttgggaggttg[132 bp omitted]gaggcaggagaatcgcttgaacctggcagttggaggttgcagtgagccaagattgcaccactgcactccagcctgatgacagagcgagactctgtctcaaaaaactaaataaataaaacaaaactaaacaaaaaacaaacagccacccacccatccacccacccacctatccacccacccatctatccattcacccatccacgaatccatccatttatccatccatctacccatccacccatcaacaaggtttgttgaaaaaaacaaacatacacccatctatcattcatccatccacccatctgtcatccatccatccacccatccatctatcgatctatccacccatcatccatccatccatcc[370 bp omitted]tatccagccaaccatccacctatccacccatacagtaacccatccatccatccatccatccatccatccatctacccatctacccatccacccatccacccaccgactcatccatccacccacccactaacccatccacccacccacccatccacccatcaacgttagttgaaaaaaacaaacatccacccacccatccatccccatccacccatccacccacccatcaaccaacccacccatccacccatccatccattcaacaacatactgagtatctactgtatgccactttggcaaggagcaggaatggagaacaaagctgtaggcagcagcaggattggggaaaagtgatccaggcagatgtcaggacaaatggaagagcttgctcaagtttgtcatgtggaggagcagagaggagactggcaaggatagtggtgatggaggaaattgagcttgatgggttgataaaggacacattagacatcattctacagaagcattcatttagcaactatgttgtaccccacatgtgctctttttttttcttccctccacggctcagcagaattttgtttgtttgtttttgagacagagtcttgctctgtcgcccaggctgcagtgcagtggtgcgatctcggctcactgcaagctccacctcctgggttcacgccattctcctgcctcagcctttccagtagctgggactacaggcacccgccaccacgcccggctaattttttcgtatttttagtagagacggggttt[132 bp omitted]ttgctctgttccctgggttgtagtggagtggcaccatctgagctcactgcagcctcaactcctgggctcaagcaggggcccagctactttttgtgtattttttgtagataatgggtctcactatattgcccaggctgatctagaactcctggcctcaagttgtcctcccaccttggcctcccaaagtgctaggattacaagcctgagccaccgatcccagctcttttttttttttttgagatggagattcgctcttgtcacccaggctggagtgcaacggcgcaatccgcttactgcaacctccgcctcccaggttcaaacgattctcttgcctcagcttccctaggagccaccaccacacccagcatgaaccataatttctaatctccttgctaatctgttagtcctgcaaaggcagtctagtccccaggcaagaaaggagtttgtttggggaaagctgttaccgtctttgtttcaaagttaaactataaactaagttactcccaaaattagtttggcctgagcccaggaatgaacaaggacagcttggaggttagaagcaaaatggagtcgtctaggtcagatctctttcactgtcaacattttctgttataatttttttttttaatggagtctagatctgtcaccaggctagagtgcagtggtgtgatcttggctcactgcaacctccgactccgggctcaagtgattctcctgcctcagcctcccgagtagctgggattacaggcacacaccaccaggccaggctaatttttttatttttagtagagacggggtttcaccatgttggccacgatggtttccatctctctctctttttttttttttttgagacggagtctccctctgtcacccaggctggagtgcaatggcgcgatctcagctcactacaacctccgcctcccaggttcaagcgattctcctgcctcagcctcccgagcagccgggattacaggcatgcgccaccatgcctagctaattttttttgttttttttttttgagacggagtctcgctctgtggcccaggctggagtgcggtggcgcgatctcagctcaccgcaagctccgcctcccgggttcaagcgattctcccgcctc[168 bp omitted]caccgtgcccggccgcctagctaatttttgtatttttttttttttgagacggagtcttgttctgtctcccaggctggagtgcagtggcgctatcttggttcactgcaagctccacctcccaggttcatgccattctcttgcctcagcctccagagtagct[136 bp omitted]cctcccaaagtgctgggattgcaggcattagccactgcgcctggccattttgtatttttttagtagagacggggtttcaccatgttggtcaggctggtattgaactcctgacctcatgatctgcccgcctcagcctcccaaagtgctggaattacaggcgtgagccaccgtgcccagccttctaatttttgcaaaggcagtttcaaacctgtaacaggaactatgggaatgaccagaggaaatggctcaggaaagagatgtacaaaagtgggaggaggccaggtgtggtggctcaagcctgtaatcccagcaccttgggagaccaaagcagggtggatagcctgaggtcaggagttcgagaccagcctagccaacatggtgaaaccccatctctactaaaaatacaaaaatcagccgggagtggtggcgcatgcctgtaatccccgctactcgggaggctgaggcaggagaatcgaatcgcttgaaaccaggaggcgggggttgcagtaagccaagatcacaccattgcactttagcctaatgacagagctagactcctccgtctcaaaaaaaaaaaagtgggcggagatacaggttgccacacctggagtccagtccatcctccaccagctcccagtagcctatgggaggggcacaggcattggtccattcatccccaaagtgtgtcttagcccggataacctgtactcagtgatcctgaggatatagatagagtgcctgcctacacaggattctggagaaatcaactgttcagaataatgttagaccaggatctctcccctggagaaccacggacatcagggccagattgttctctggggtgggctatcctgggcactgcagggtggtaagcagcgtccgtggcctccacccactccatgccaggagcttccttgcaccttagctgtgacaatcacaaatgttcccagacatcgcccagtgtttcctgggtgcagaatcacccctggttgagaccgcctgggtaagggattccaagagcccccaagagactgcatcccatgatccaccaccctgctgaggtcccaggaggctgcccacattgaaatccacaccctgagtgggtagggagagagaggaggtgagtcctaggaccc[135 bp omitted]cacctccgcctcccaggttcaagccattctgttgcctcagcctcccgagtagctgggattacaggtgcctgccaccatgcctggctaatttttgcacttttagtagagacggggtttcaccatg[132 bp omitted]ttagataaaagttctttttttttccacaaggaaaataatgtcaaggtcaaaataagtatgtagagatgaatctctaaagttaatgttttatttggcaagaaagaattggaatttgaggcatacatgcagaccaaagaggagtctggggttttatagaaaaagaggagtgtggctgggcatgatggtttatgcctgtaatcccagcacttaggaaggctgaggtgggaatataacttgagatcaagagttcgagaccagcctggccaacatggcgagaccctatctctactaaaaatacaaaaattagctgggcacaatagtgggcacttagaatcccagctacttgggaggctgaggcgggagaatcgctggaacctaggaggcgctggttgtagtgactggagatcccagtcactactccagcctaggcgagagtaagactatgtcaataaataaataaataaataaataaaaagaccagcctgggttacatagcaggaccgcatctttccaacaacaaagaaaaagcccattgagttttttttttttttttttttgagacacagtctcactctgtcgcccaggctggagtgcagtggcacgatctcgggtcactgcagcctctgcctcccggactcaagtgatttctcctgcctc[198 bp omitted]tcaacactaaaggggccgggtgcggtggctgatgcctataaatctccgaatttcgaatttcgggaggctgaggagggcggatcacttgagtttgagattaggagttagagaccagcctggccaacatggcggaaatgcatctctactaaaactacaaaaattaaccgggcgtggtgactcgtgcctgtagtcccagctactcgggaggctgaggcag[136 bp omitted]gtacaaggcacttgtacttgacactgaaaggctttaatcaccaggggctgtggcagtgactgcgggactctattgctgagaggaggaaagcatcggaggtcaagtgactctcccaacgtcacccagcagggaaggggtggggcagggctggaatctggctgggcagggagggtgttggtgtcccccggggacttggggaggtgctggtggtgaaaccgcctttgcaaaattatgactgagacagttaaagagatctaacttcaccgactccctcttccttctaacctccaagctgtccttgttcatccctgggcataggctgaactaactttgggagaaacttatagtttaattaaattaattaattaattaattaattatttttttgagacggagtcttgctctgttgcccaggccggagtgcagtggtgcaatatcggctcactgcaacctctgcctcctgggttcaagcgattctcctacctcagcccccgcagtagctgggattacaggcgcccgccaccgcgcccagctaatttttgtatttttaatagagacagggtttcaccatgttggccaggctgatctcgaactcctgacctcaggtgatcttcccgcctcggcctcacaaagtgctgggattacaggcatgagccagggctcctggccgtgagagggggtttctccatgttggtcaggctggtctcgaactcctgacctcaggtgatctgcccgccttggcctcccaaagtgctgggattacaggggtgaatcaccgcgcctggcctttttttttttttttgtacccaataaacagcattgttgtcgaatgaatactggacttggagctacagcaagtcctggaccgtgactcttatggggggaaattcggatttttggttttactaagccgtgtgtggggaggtgtccggcgtcctcctcctgggacgggattcgaacccgctatccgacgggcccgcccacagggtctccccgggtccccgcttcgggccggcgagtgggggaaggggtcggccgagggcaaccgaggacgtgcgtgcgtacgttcgtgcgtgcgtggattcgggcgggcgggcgagtccacggggcggggcgccgagggggtggcgcgcgcgggtcggcccgctgggcggcgggcacgcgccggcgtcttcgctccgggctcccctagcgcgcggggcgagtggttccgcccggcccccggctcattgtgctcgcttcacgccggcccaagatggcggaggcgctggaggccccgggcctgtgactacaaagagggagtcgggggccgggccggaccggagcgcggcggcggcggcggcggcggccgaggccgaggccaggccccctcccctcagcctcccgcccctccctcccgcccgccctcctccgcccaccggcggccccgcccctcccccaaccgcccgcctagcatggtgcggcggccgcgcgcgcggacatgggggagaagctggagctgagactgaagtcgcccgtgggggctgagcccgccgtctacccgtggccgctgccggtctacgtgagtgccgccctccaccgtccctacctcccggcctcccctcctccgccgcccctggggacaccccaaacccccccaagccgcgctcaccggtcccccctgcggaacggagaccctggactccactgtcgctgctccacccccgttgcttcccggccgagggccccgcggctgtttcccgcagggtgggagccccgcgcgcctggggtgggagcgggagccggcgcccccgagccctaccgcggtgccgttgcccccgccgggctgtcccgggcgcggaacggaaggggtaactcgtgccggccgcgttttgactggaagcccgcccgcccgccccgctcgttcccggcgctgtcagtgtgtccgccgccttatttttctttttgagggcatcctttcctgtctcctcttctcttctttttaaaaattgggcgtttgtcacgcttttcctactcgggcacggcgggcccgaccctgcgaaggtgggagttaacgtccccttgagtgggcgggagcggtctgacctttggaaatggggaatttttgtccccgtaattttgagtgggtatgggctgccctggccctgggaaattaggcatctttgacctgttaatcctagttggttggggacaggctttatttatccttggaaattgggacttctccccgatcttgagtgggcaggattgggctcacccccggagttagtaaattttgtcttcttcatcttggtgaccgttggaaaatgacaggccgggtggaatgttacagaggcaccccaccgggtggttccagaaacccgcgtgcggctcccggggtgcgagtcccggcgtggcccctgaggaggcggggcgcgtgcgtccgcgcttgggaccctctggccacgctccgggctgggcagggcgcgttttcggggaaaagtgaagcaggcgctgtcagcgagcgtgtccggggcgcgagttttggggggcgcgtctgcagggcccggccgggcatccccgcgcgccctgggactcccgcgcgcgctgggcttgtgtcagtttttggaaacgtgctcgctgggggcggggtcaggacgcggagagcgctggggagcccgggctggctcactgccccgggtcggtgcgagtggatgggagagggagcgcagcttccagcctggccgcacgtcccgcgcgcggggctggcggggtagggccctggggctctggcttctctggttgggcagctccgggtgtgcgcctgggcggcctgagccgggatcccgccaggagaggtcctaggacaaaaactgaaagcagaggccgcgcttcagcgccccgaccggtttcctccctcgaaagttcaaactccagaacccttccagcctccacttctctctgttgggctctcatcgttttaggtggtagaaggcatatgaccataagagttctaactgtaactgactgaagatcaattgaggtggcttaccaccgtccgaccagccccagtacatggcttcacatttttttttttttttttgagacggagtctcgatctgtcgccaaagctggagtgcagcggcgcgatctcggctcgctgcaagctccgcctcccgggttcacgccattctcctgcctcagcctccccagtagctaggactataggcgcccgccaccacgcccggctaatgttttttgtgtttttagtagagacggggttt[131 bp omitted]atgttgttatttttggagtcggagtttcgctcttgttgcccaggctggagtgcaatggtgcgatctcggctcactgaaacctcagcctcccgggttcaagcgattctcctgcctcggcctccctggtaggtgggattacaggcatgcgccaccacaccctgctaattttgtatttttagtagagacggggtttc[133 bp omitted]tttgagaggaagtgttgcttttgttgcccagactggagtgcagtggtgccatctctgctcactgcatcgtctgcctcccgggttcaagcgattctcctgcctcagcctcctgagtagctgggattactggcatgagccaccacgtccggctaattttgtatttttagtagataccaggtttcttcatgttggctaggctggtctcgaactcctaacctcaggtgatccgcctgccttggcttcccaaagtgccgggattacaggggtgagccaccgcacctggcctcacatttattcgtatatcttcctctttcagttcacctagggcgtagttcgctggttgcagggtacagttctatacgttttgacaaactcattgggtggtgccctgaccagtgctgccgtccaggtgcagaacccccagcttccctgcggcgcccccatcctcagcttgcctgggagctcctggctgctccccacctggccttacctgtagttctgccattctcagaaagttggctgaatggaatcaacagcatgttgccctttggtcctggtggctttcaggcggccaaatccgtgttgctgcaggtttcaaaagttaccccatttttttgctgactgtaaatccattggacagttgggccacagattgttgacgtgtttgcctgtgggtcacaggactgtgggctgtttccaatttttggtgattagaataaacccgcactaaacaccactggcgggatttttggtgaaagtcagtgttcgcgtggcgaggttctcaggggtggaccgcacggcctgtgctaagcgtctgtttaacatctgcatcccaacagttgccacttgtcagtgctaagaaacccactggaacccagcgtcggggcctggggtagtggtcttgccagggaccctttgccttttccttggtactgaagtgaacattcacgtgaaggcagccctggtgtccccgcccgcatgcctgctgccctgcctggccagtgctccattgtaaatagtaagggcgagagctggcgggagcgggctttctagtggtgggcgggactgtgccgtgtctttccctccctggccaggccctggcttggcagggtgtgctggtcctggcgccgtctacggcctcttcctgctctggttggcccactgccgggcccagcatcttcattcgcccaagtgccagaggcagccttctgacaacctcgccgtgacatttgtcattttctgtgttcccgttgaggaat[131 bp omitted]agctccgcctcccaggtttcagtgattctcctgcctcagcctccccagtagctgggattacagacctgtgccaccatgcctggcttattttgtatttttagtagagacagggtttcaccatattggccaggctggtctcaaactcctgacctcaggtgatccgtccacctcggcctcccagagtgctgggatgacaggcgtgaaccaccgtgcccagacgcagctgcagcagcacatttattcatgattcattccaacagcagctactgaatactcagtgttgtgggggcacagaggacaacaagccaatattctccccccgccaccgccccagcattcttagtctcaagaaacctgtcaaatgaagacaggccgggcacaggggctcatgcctgtagtccctgcactttgggaagcccaggcgggaggattgcttgagcccaggagtttgagacaagccagggcaacatagggagactccatctctaccaaaaaatttaaaacagtgaagttaagtagattataaatagaagttcagcagagatactgtgctgagtacaaggtcagctgaggtccccagggaggggctgccacttctgccctgggggacctgtgggtggctgcttggaggaggggccatccggaggaggaagcagaaatagccacaactgtccacgctcggaaatgagcagttcggaaggggtttgcccaattggcaaacgcaagggggaggaagggagatttttattcttacatgacctgggagttcctggataaccgcttttctcaagccccgcatggcatttcttatttttttgagagggaatctcgtactgttgcctgggctggagtacaacggtgtgatctcggttcactgcaacatctgcctcctgggttcaagtgattctcctgtctcagcctccccagtaggtgggactacaggcacccgccaccacgcccagctaattttttgtatttttagtagcgacaggttttcactatgttggccaggctggtctcgaactcctgaccttgtcatctacctgcctgggcctcccagagtgctaggattacaggcatgagccaccgtgcctggccctgcgtggtatttctagggcaggatggccctgcccttcttctagtgggaagggcacaagtggcattattggttgtttgctcggaaagaaccttcaaaggccacagaacgggaccttccccctggtgactcacaggctgtgggcgggcaggggcggcctccactggccaagggtccggactctctgactctcattaatgagtgagtacatgttccgcctgacagcctggcctggagcccggctgtgggcggcggtgagtgggcagccagcagtgagtagcagccggggcggggtgagctgtccccaccgtgactcagaaggtattttctgctgctgacctctgagcttgagtgtcctgagtaatcccagctcccccggaggcagattaacctttaggcagctttgtgtgagtaaaggagtcgctttaaataggaaggaataatagaaaaaacccaagtgttccgttttatagcaaatgcacactgctttgttcctgctggcctgaaagaggttgcagggggtactggggcggggaattgtccagaaactctgcagatgatacagggacactccagcctagcctctgaggagagttttttttgagacggactcgctctgtctcccaggctggagtgcagtggcccaatctcggctcactgcagcctccgcctcctgggttcaagtgattctcctgcctcagcctcccgagtagctgggattacaggtgtgagccaccacgcccagctctttttttcctttaaaaatctgcttgttatctgctgctcatcagagtgtatatttggggtaattcgagcctgtgctcccaggttgcagtcctcaaatgtggcccaaataaatgctccacttatattaattttgctccagttcctttcctttagctcgacagtgtgaatctacaattatcttaaaataaaaagtttaattaaaaaaaacacacggttgcccaggcacggtggctcatgcctgtaatcccggcactttgggaggccaaggcgggcagatcacctgcggtcaggagttcgagaccagcttggccaacatgacgaaaccccgtatttaccaaaaatacaaaaattagctgggcgtggtggcggttgcctataatccggagaattgcttgaacccgagagggggaggctgcagtgagctgagatcatgccattacactccagactggtcgacagagtgagactctgtctcaaacaaacagacaaaattagataaaggaaaaaagaatttttgttcaagtaatattggccattgatggctgcaaatcactcttggtgttacagattccaggaacaggaagatagtgtccgagaccaggatgcaggaacagatagatgcctttccacgcttgcccctggtgtggttgggaggcgtgactgaaatccttgctcttgtctctctggacctgatgcattttgcatgcctcactgggcacggactgcttggagctgtttttatcttccagcagtgtgaggtgtaggaaggacccaacacggttcctcctgtgctctccgcagtcaacacagaggagttgcggaaccagatacgggtacccggggattcatcagttctgtgtttcctactgggcagccccgattcaactcacttccagcatgtctacctcgacacaggctcagatcccacggggtaagggctcagtccccaagactcccccactttccatgccagttagaggcctcacgttgtgacctgtgcttctgagtgaccggtcggctgtaaatccaggttcccgtcacccttacctcggcttgattacattgcctcagtggctcacagaactcccgagaaacacttaggtcctttggttaatgataaaggacgatctgtgggatgcccatgaatactgagaaatggatcctcagggcaaggcatgggggaagggcccactccctccaggagtctcccggaacgtgtgtctcccgggacctgtccccctccaggagtctcctggaacctgtccccctccaagagtctcccagaacctgtcctttagagtgttgtttctctcattatttttgggatagggtcttgctttgtcacccaggctggagtgcagtggc

(The sequence listing continues in the following parts.)

1. A method for treating or preventing a gastrointestinal disease, the method comprising: administering to a subject in need thereof an agent that increases the level or activity of Free Fatty Acid Receptor 2 (Ffar2) in the subject.

2. The method of claim 1, wherein the agent preferentially binds to a Ffar2 receptor.

3. The method of claim 1, wherein the agent induces an increase in the number of group 3 innate lymphoid cells (ILC3s).

4. The method of claim 1, wherein the agent induces secretion of interleukin-22 (IL-22) and/or interleukin-17 (IL-17) from ILC3s.

5. The method of claim 1, wherein the agent is selected from the group consisting of a small molecule, an antibody, a peptide, a genome editing system, a vector, and a nucleic acid.

6. The method of claim 5, wherein the small molecule is a short chain fatty acid (SCFA) pharmaceutically acceptable salt, or derivative thereof.

7. The method of claim 6, wherein the SCFA is selected from the group consisting of: propionic acid, acetic acid, butyric acid, formic acid, isobutyric acid, valeric acid, isovaleric acid, formate, acetate, propionate, butyrate, pentanoate, isobutyrate, valerate, isovalerate, sodium propionate, and pharmaceutically acceptable salts thereof.

8. The method of claim 5, wherein the small molecule is selected from the group consisting of: ES43012-SOD, trans-2-methylcrotonic acid, propiolic acid, angelic acid, compound 34, sodium acetate, sodium propionate, sodium butyrate, formate, pentanoate, (S)-2-(4-chlorophenyl)-3,3-dimethyl-N-(5-phenylthiazol-2-yl)butanamide, BTI-A-404, BTI-A-292, AZ1729, and any derivative thereof.

9. The method of claim 5, wherein the vector or nucleic acid encodes an Ffar2 polypeptide.

10.-13. (canceled)

14. The method of claim 1, wherein the agent is formulated with a pharmaceutical composition.

15. The method of claim 14, wherein the pharmaceutical composition is formulated to restrict delivery of the agent to the gastrointestinal tract of the subject.

16. (canceled)

17. The method of claim 1, wherein the gastrointestinal disease is selected from the group consisting of: a gastrointestinal infection, inflammatory bowel disease (IBD), gastrointestinal injury, appendicitis, Crohn's disease (CD), ulcerative colitis (UC), gastritis, enteritis, esophagitis, gastroesophageal reflux disease (GERD), celiac disease, diverticulitis, food intolerance, ulcer, infectious colitis, irritable bowel syndrome, and cancer.

18. The method of claim 1, wherein the administering reduces inflammation of the gastrointestinal tract.

19.-23. (canceled)

24. A method of reducing inflammation in the gastrointestinal tract of a subject, the method comprising: administering to a subject an agent that increases the level or activity of Free Fatty Acid Receptor 2 (Ffar2) in the subject.

25. The method of claim 24, wherein the agent preferentially binds to a Ffar2 receptor.

26. The method of claim 24, wherein the agent induces an increase in the number of group 3 innate lymphoid cells (ILC3s).

27. The method of claim 24, wherein the agent induces secretion of interleukin-22 (IL-22) and/or interleukin-17 (IL-17) from ILC3s.

28. The method of claim 24, wherein the agent is selected from the group consisting of a small molecule, an antibody, a peptide, a genome editing system, a vector, and a nucleic acid.

29. The method of claim 28, wherein the small molecule is a short chain fatty acid (SCFA) pharmaceutically acceptable salt, or derivative thereof.

30.-35. (canceled)

36. An assay for identifying an agent that modulates a functional property of an immune lymphoid cell, the assay comprising:
a. contacting a population of innate lymphoid cells with an agent; and
b. detecting the level of Ffar2
wherein detecting a change in Ffar2 levels after contacting step (a) identifies the agent as one that can modulate a functional property of innate lymphoid cells.

37.-52. (canceled)
